(19) United States
(12) Patent Application Publication
(10) Pub. No.: US 2009/0317420 A1
(43) Pub. Date: Dec. 24, 2009

(54) Immunogenic compositions for gram positive bacteria such as streptococcus agalactiae

(75) Inventors: John Telford, Siena (IT); Guido Grandi, Siena (IT); Peter Lauer, Berkeley, CA (US); Marlrosa Mora, Siena (IT); Immaculada Margarit Y Ros, Siena (IT); Domenico Malone, Siena (IT); Guiliano Bensi, Siena (IT); Daniela Rinaudo, Siena (IT); Vega Masignani, Siena (IT); Michelle Barocchi, Siena (IT); Rino Rappuloi, Siena (IT)

Correspondence Address: NOVARTIS VACCINES AND DIAGNOSTICS INC., INTELLECTUAL PROPERTY- X100B, P.O. BOX 8097, Emeryville, CA, 94662-8097, US

(73) Assignee: Chiron Corporation, Emeryville, CA (US)

(21) Appl. No.: 11/658,842

(22) PCT Filed: Jul. 29, 2005
(86) PCT No.: PCT/US05/27239

§ 371 Date: May 27, 2009

Related U.S. Application Data
(60) Provisional application No. 60/592,805, filed on Jul. 29, 2004.
(60) Provisional application No. 60/609,833, filed on Sep. 13, 2004.
(60) Provisional application No. 60/616,833, filed on Oct. 8, 2004.
(60) Provisional application No. 60/633,418, filed on Dec. 7, 2004.
(60) Provisional application No. 60/640,069, filed on Dec. 30, 2004.
(60) Provisional application No. 60/660,321, filed on Mar. 11, 2005.
(60) Provisional application No. 60/673,754, filed on Apr. 22, 2005.
(60) Provisional application No. 60/693,001, filed on Jun. 21, 2005.
(60) Provisional application No. 60/695,453, filed on Jul. 1, 2005.
(60) Provisional application No. 60/697,643, filed on Jul. 11, 2005.

(51) Int. Cl. A61K 39/085; A61P 31/04; C12N 1/20; C12P 21/02; C07K 14/315

(52) U.S. Cl. 424/190.1; 435/252.1; 435/71.2; 530/350

(57) ABSTRACT

The invention relates to the identification of a new adhesin islands within the genomes of several Group A and Group B Streptococcus serotypes and isolates. The adhesin islands are thought to encode surface proteins which are important in the bacteria's virulence. Thus, the adhesin island proteins of the invention may be used in immunogenic compositions for prophylactic or therapeutic immunization against GAS or GBS infection. For example, the invention may include an immunogenic composition comprising one or more of the discovered adhesin island proteins.

### FIELD OF THE INVENTION

[0001] The invention relates to the identification of adhesin islands within the genome Streptococcus agalactiae (“GBS”) and the use of adhesin island amino acid sequences encoded by these adhesin islands in compositions for the treatment or prevention of GBS infection. Similar sequences have been identified in other Gram positive bacteria. The invention further includes immunogenic compositions comprising adhesin island amino acid sequences of Gram positive bacteria for the treatment or prevention of infection of Gram positive bacteria. Preferred immunogenic compositions of the invention include an adhesin island surface protein which may be formulated or purified in an oligomeric or pilus form.

### BACKGROUND OF THE INVENTION

[0002] GBS has emerged in the last 20 years as the major cause of neonatal sepsis and meningitis that affects 0.5-3 per 1000 live births, and an important cause of morbidity among older age groups affecting 5-8 per 100,000 of the population. Current disease management strategies rely on intrapartum antibiotics and neonatal monitoring which have reduced neonatal case mortality from >50% in the 1970's to less than 10% in the 1990's. Nevertheless, there is still considerable morbidity and mortality and the management is expensive. 15-35% of pregnant women are asymptomatic carriers and at high risk of transmitting the disease to their babies. Risk of neonatal infection is associated with low serotype specific maternal antibodies and high titers are believed to be protective. In addition, invasive GBS disease is increasingly recognized in elderly adults with underlying disease such as diabetes and cancer.

[0003] The “B” in “GBS” refers to the Lancefield classification, which is based on the antigenicity of a carbohydrate which is soluble in dilute acid and called the C carbohydrate. Lancefield identified 13 types of C carbohydrate, designated A to O, that could be serologically differentiated. The organisms that most commonly infect humans are found in groups A, B, D, and G. Within group B, strains can be divided into at least 9 serotypes (Ia, Ib, Ia/c, II, III, IV, V, VI, VII and VIII) based on the structure of their polysaccharide capsule. In the past, serotypes Ia, Ib, II, and III were equally prevalent in normal vaginal carriage and early onset sepsis in newborns. Type V GBS has emerged as an important cause of GBS infection in the USA, however, and strains of types VI and VIII have become prevalent among Japanese women.

[0004] The genome sequence of a serotype V strain 2603 V/R has been published (See Tettelin et al. (2002) Proc. Natl. Acad. Sci. USA, 10.1073/pnas.182380799) and various polypeptides for use a vaccine antigens have been identified (WO 02/34771). The vaccines currently in clinical trials, however, are based primarily on polysaccharide antigens. These suffer from serotype-specificity and poor immunogenicity, and so there is a need for effective vaccines against S. agalactiae infection.

[0005] S. agalactiae is classified as a gram positive bacterium, a collection of about 21 genera of bacteria that colonize humans, have a generally spherical shape, a positive Gram stain reaction and lack endospores. Gram positive bacteria are frequent human pathogens and include Staphylococcus (such as S. aureus), Streptococcus (such as S. pyogenes (GBS), S. pyogenes (GAS), S. pneumonaie, S. mutans), Enterococcus (such as E. faecalis and E. faecium), Clostridium (such as C. difficile), Listeria (such as L. monocytogenes) and Corynebacterium (such as C. diphtheria).

[0006] It is an object of the invention to provide further and improved compositions for providing immunity against disease and/or infection of Gram positive bacteria. The compositions are based on the identification of adhesin islands within Streptococcal genomes and the use of amino acid sequences encoded by these islands in therapeutic or prophylactic compositions. The invention further includes compositions comprising immunogenic adhesin island proteins within other Gram positive bacteria in therapeutic or prophylactic compositions.

### SUMMARY OF THE INVENTION

[0007] Applicants have identified a new adhesin island, “GBS Adhesin Island 1”, “AI-1” or “GBS AI-1”, within the genomes of several Group B Streptococcus serotypes and isolates. This adhesin island is thought to encode surface proteins which are important in the bacteria's virulence. In addition, Applicants have discovered that surface proteins within GBS Adhesin Islands form a previously unseen pilus structure on the surface of GBS bacteria. Amino acid sequences encoded by such GBS Adhesin Islands may be used in immunogenic compositions for the treatment or prevention of GBS infection.

[0008] A preferred immunogenic composition of the invention comprises an AI-1 surface protein, such as GBS 80, which may be formulated or purified in an oligomeric (pilus) form. In a preferred embodiment, the oligomeric form is a hyperoligomer. Electron micrographs depicting some of the first visualizations of this pilus structure in a wild type GBS strain are shown in FIGS. 16, 17, 49, and 50. In addition, Applicants have transformed a GBS strain with a plasmid comprising the AI surface protein GBS 80 which resulted in increased production of that AI surface protein. The electron micrographs of this mutant GBS strain in FIGS. 13-15 reveal long, hyper-oligomeric structures comprising GBS 80 which appear to cover portions of the surface of the bacteria and stretch far out into the supernatant. These hyper-oligomeric pilus structures comprising a GBS AI surface protein may be purified or otherwise formulated for use in immunogenic compositions.

[0009] GBS AI-1 comprises a series of approximately five open reading frames encoding for a collection of amino acid sequences comprising surface proteins and sortases (“AI-1 proteins”). Specifically, AI-1 includes polynucleotide sequences encoding for two or more of GBS 80, GBS 104, GBS 52, SAG0647 and SAG0648. One or more of the AI-1 polynucleotide sequences may be replaced by a polynucleotide sequence coding for a fragment of the replaced ORF. Alternatively, one or more of the AI-1 open reading frames may be replaced by a sequence having sequence homology (sequence identity) to the replaced ORF.

[0010] AI-1 typically resides on an approximately 16.1 kb transposon-like element frequently inserted into the open reading frame for trmA. One or more of the AI-1 surface protein sequences typically include an LPXTG motif (such as LPXTG (SEQ ID NO: 122)) or other sortase substrate motif. The AI surface proteins of the invention may affect the ability of the GBS bacteria to adhere to and invade epithelial cells. AI surface proteins may also affect the ability of GBS to translocate through an epithelial cell layer. Preferably, one or more AI surface proteins are capable of binding to or otherwise associating with an epithelial cell surface. AI surface proteins may also be able to bind to or associate with fibrinogen, fibronectin, or collagen.

[0011] The sortase proteins are thought to be involved in the secretion and anchoring of the LPXTG containing surface proteins. AI-1 may encode at least one surface protein. Alternatively, AI-1 may encode at least two surface proteins and at least one sortase. Preferably, AI-1 encodes for at least three surface proteins and at least two sortases. One or more of the surface proteins may include an LPXTG motif or other sortase substrate motif.

[0012] The GBS AI-1 protein of the composition may be selected from the group consisting of GBS 80, GBS 104, GBS 52, SAG0647 and SAG0648. GBS AI-1 surface proteins GBS 80 and GBS 104 are preferred for use in the immunogenic compositions of the invention.

[0013] In addition to the open reading frames encoding the AI-1 proteins, AI-1 may also include a divergently transcribed transcriptional regulator such as araC (i.e., the transcriptional regulator is located near or adjacent to the AI protein open reading frames, but it transcribed in the opposite direction). It is believed that araC may regulate the expression of the GBS AI operon. (See Korbel et al., Nature Biotechnology (2004) 22(7): 911-917 for a discussion of divergently transcribed regulators in E. coli).

[0014] A second adhesin island, “Adhesin Island-2”, “AI-2” or “GBS AI-2”, has also been identified in numerous GBS serotypes. Amino acid sequences encoded by the open reading frames of AI-2 may also be used in immunogenic compositions for the treatment or prevention of GBS infection.

[0015] GBS AI-2 comprises a series of approximately five open reading frames encoding for a collection of amino acid sequences comprising surface proteins and sortases. Specifically, AI-2 includes open reading frames encoding for two or more of GBS 67, GBS 59, GBS 150, SAG1405, SAG1406, 01520, 01521, 01522, 01523, 01523, 01524 and 01525. The GBS AI-2 sequences may be divided into two subgroups. In one embodiment, AI-2 includes open reading frames encoding for two or more of GBS 67, GBS 59, GBS 150, SAG1405, and SAG1406. This collection of open reading frames may be generally referred to as GBS AI-2 subgroup 1. Alternatively, AI-2 may include open reading frames encoding for two or more of 01520, 01521, 01522, 01523, 01523, 01524 and 01525. This collection of open reading frames may be generally referred to as GBS AI-2 subgroup 2.

[0016] One or more of the AI-2 open reading frame polynucleotide sequences may be replaced by a polynucleotide sequence coding for a fragment of the replaced ORF. Alternatively, one or more of the AI-2 open reading frames may be replaced by a sequence having sequence homology (sequence identity) to the replaced ORF.

[0017] One or more of the AI-2 surface proteins typically include an LPXTG motif (such as LPXTG (SEQ ID NO: 122)) or other sortase substrate motif. These sortase proteins are thought to be involved in the secretion and anchoring of the LPXTG containing surface proteins. AI-2 may encode for at least one surface protein. Alternatively, AI-2 may encode for at least two surface proteins and at least one sortase. Preferably, AI-2 encodes for at least three surface proteins and at least two sortases. One or more of the surface proteins may include an LPXTG motif.

[0018] The AI-2 protein of the composition may be selected from the group consisting of GBS 67, GBS 59, GBS 150, SAG1405, SAG1406, 01520, 01521, 01522, 01523, 01523, 01524 and 01525. AI-2 surface proteins GBS 67, GBS 59, and 01524 are preferred AI-2 proteins for use in the immunogenic compositions of the invention. GBS 67 or GBS 59 is particularly preferred.

[0019] GBS AI-2 may also include a divergently transcribed transcriptional regulator such as a RofA like protein (for example rogB). As in AI-1, rogB is thought to regulate the expression of the AI-2 operon.

[0020] The GBS AI proteins of the invention may be used in immunogenic compositions for prophylactic or therapeutic immunization against GBS infection. For example, the invention may include an immunogenic composition comprising one or more GBS AI-1 proteins and one or more GBS AI-2 proteins.

[0021] The immunogenic compositions may also be selected to provide protection against an increased range of GBS serotypes and strain isolates. For example, the immunogenic composition may comprise a first and second GBS AI protein, wherein a full length polynucleotide sequence encoding for the first GBS AI protein is not present in a genome comprising a full length polynucleotide sequence encoding for the second GBS AI protein. In addition, each antigen selected for use in the immunogenic compositions will preferably be present in the genomes of multiple GBS serotypes and strain isolates. Preferably, each antigen is present in the genomes of at least two (i.e., 3, 4, 5, 6, 7, 8, 9, 10, or more) GBS strain isolates. More preferably, each antigen is present in the genomes of at least two (i.e., at least 3, 4, 5 or more) GBS serotypes.

[0022] Within GBS AI-1, Applicants have found that Group B Streptococcus surface exposure of GBS 104 is dependent on the concurrent expression of GBS 80. It is thought that GBS 80 is involved in the transport or localization of GBS 104 to the surface of the bacteria. The two proteins may be oligomerized or otherwise chemically or physically associated. It is possible that this association involves a conformational change in GBS 104 that facilitates its transition to the surface of the GBS bacteria. In addition, one or more AI sortases may also be involved in this surface localization and chemical or physical association. Similar relationships are thought to exist within GBS AI-2. The compositions of the invention may therefore include at least two AI proteins, wherein the two AI proteins are physically or chemically associated. Preferably, the two AI proteins form an oligomer. Preferably, one or more of the AI proteins are in a hyper-oligomeric form. In one embodiment, the associated AI proteins may be purified or isolated from a GBS bacteria or recombinant host cell.

[0023] It is also an object of the invention to provide further and improved compositions for providing prophylactic or therapeutic protection against disease and/or infection of Gram positive bacteria. The compositions are based on the identification of adhesin islands within Streptococcal genomes and the use of amino acid sequences encoded by these islands in therapeutic or prophylactic compositions. The invention further includes compositions comprising immunogenic adhesin island proteins within other Gram positive bacteria in therapeutic or prophylactic compositions. Preferred Gram positive adhesin island proteins for use in the invention may be derived from Staphylococcus (such as S. aureus), Streptococcus (such as S. agalactiae (GBS), S. pyogenes (GAS), S. pneumonaie, S. mutans), Enterococcus (such as E. faecalis and E. faecium), Clostridium (such as C. difficile), Listeria (such as L. monocytogenes) and Corynebacterium (such as C. diphtheria). Preferably, the Gram positive adhesin island surface proteins are in oligomeric or hyperoligomeric form.

[0024] For example, Applicants have identified adhesin islands within the genomes of several Group A Streptococcus serotypes and isolates. These adhesion islands are thought to encode surface proteins which are important in the bacteria's virulence, and Applicants have obtained the first electron micrographs revealing the presence of these adhesin island proteins in hyperoligomeric pilus structures on the surface of Group A Streptococcus.

[0025] Group A Streptococcus is a human specific pathogen which causes a wide variety of diseases ranging from pharyngitis and impetigo through life threatening invasive disease and necrotizing fasciitis. In addition, post-streptococcal autoimmune responses are still a major cause of cardiac pathology in children.

[0026] Group A Streptococcal infection of its human host can generally occur in three phases. The first phase involves attachment and/or invasion of the bacteria into host tissue and multiplication of the bacteria within the extracellular spaces. Generally this attachment phase begins in the throat or the skin. The deeper the tissue level infected, the more severe the damage that can be caused. In the second stage of infection, the bacteria secretes a soluble toxin that diffuses into the surrounding tissue or even systemically through the vasculature. This toxin binds to susceptible host cell receptors and triggers innappropropriate immune responses by these host cells, resulting in pathology. Because the toxin can diffuse throughout the host, the necrosis directly caused by the GAS toxins may be physically located in sites distant from the bacterial infection. The final phase of GAS infection can occur long after the original bacteria have been cleared from the host system. At this stage, the host's previous immune response to the GAS bacteria due to cross reactivity between epitopes of a GAS surface protein, M, and host tissues, such as the heart. A general review of GAS infection can be found in Principles of Bacterial Pathogeneis, Groisman ed., Chapter 15 (2001).

[0027] In order to prevent the pathogenic effects associated with the later stages of GAS infection, an effective vaccine against GAS will preferably facilitate host elimination of the bacteria during the initial attachment and invasion stage.

[0028] Isolates of Group A Streptococcus are historically classified according to the M surface protein described above. The M protein is surface exposed trypsin-sensitive protein generally comprising two polypeptide chains complexed in an alpha helical formation. The carboxyl terminus is anchored in the cytoplasmic membrane and is highly conserved among all group A streptococci. The amino terminus, which extend through the cell wall to the cell surface, is responsible for the antigenic variability observed among the 80 or more serotypes of M proteins.

[0029] A second layer of classification is based on a variable, trypsin-resistant surface antigen, commonly referred to as the T-antigen. Decades of epidemiology based on M and T serological typing have been central to studies on the biological diversity and disease causing potential of Group A Streptococci. While the M-protein component and its inherent variability have been extensively characterized, even after five decades of study, there is still very little known about the structure and variability of T-antigens. Antisera to define T types is commercially available from several sources, including Sevapharma (http://www.sevapharma.cz/en).

[0030] The gene coding for one form of T-antigen, T-type 6, from an M6 strain of GAS (D741) has been cloned and characterized and maps to an approximately 11 kb highly variable pathogenicity island. Schneewind et al., J Bacteriol. (1990) 172(6):3310-3317. This island is known as the Fibronectin-binding, Collagen-binding T-antigen (FCT) region because it contains, in addition to the T6 coding gene (tee6), members of a family of genes coding for Extra Cellular Matrix (ECM) binding proteins. Bessen et al., Infection & Immunity (2002) 70(3): 1159-1167. Several of the protein products of this gene family have been shown to directly bind either fibronectin and/or collagen. See Hanski et al., Infection & Immunity (1992) 60(12):5119-5125; Talay et al., Infection & Immunity (1992(60(9):3837-3844; Jaffe et al. (1996) 21(2):373-384; Rocha et al., Adv Exp Med Biol. (1997) 418:737-739; Kreikemeyer et al., J Biol Chem (2004) 279(16):15850-15859; Podbielski et al., Mol. Microbiol. (1999) 31(4): 1051-64; and Kreikemeyer et al., Int. J. Med Microbiol (2004) 294(2-3):177-88. In some cases direct evidence for a role of these proteins in adhesion and invasion has been obtained.

[0031] Applicants raised antiserum against a recombinant product of the tee6 gene and used it to explore the expression of T6 in M6 strain 2724. In immunoblot of mutanolysin extracts of this strain, the antiserum recognized, in addition to a band corresponding to the predicted molecular mass of the product, very high molecular weight ladders ranging in mobility from about 100 kDa to beyond the resolution of the 3-8% gradient gels used.

[0032] This pattern of high molecular weight products is similar to that observed in immunoblots of the protein components of the pili identified in Streptococcus agalactiae (described above) and previously in Corynebacterium diphtheriae. Electron microscopy of strain M6_{—}2724 with antisera specific for the product of tee6 revealed abundant surface staining and long pilus like structures extending up to 700 nanometers from the bacterial surface, revealing that the T6 protein, one of the antigens recognized in the original Lancefiled serotyping system, is located within a GAS Adhesin Island (GAS AI-1) and forms long covalently linked pilus structures.

[0033] Applicants have identified at least four different Group A Streptococcus Adhesin Islands. While these GAS AI sequences can be identified in numerous M types, Applicants have surprisingly discovered a correlation between the four main pilus subunits from the four different GAS AI types and specific T classifications. While other trypsin-resistant surface exposed proteins are likely also implicated in the T classification designations, the discovery of the role of the GAS adhesin islands (and the associated hyper-oligomeric pilus like structures) in T classification and GAS serotype variance has important implications for prevention and treatment of GAS infections. Applicants have identified protein components within each of the GAS adhesin islands which are associated with the pilus formation. These proteins are believed to be involved in the bacteria's initial adherence mechanisms. Immunological recognition of these proteins may allow the host immune response to slow or prevent the bacteria's transition into the more pathogenic later stages of infection.

[0034] In addition, Applicants have discovered that the GBS pili structures appear to be implicated in the formation of biofilms (populations of bacteria growing on a surface, often enclosed in an exopolysaccharide matrix). Biofilms are generally associated with bacterial resistance, as antibiotic treatments and host immune response are frequently unable to eradicate all of the bacteria components of the biofilm. Direction of a host immune response against surface proteins exposed during the first steps of bacterial attachment (i.e., before complete biofilm formation) is preferable.

[0035] The invention therefore provides for improved immunogenic compositions against GAS infection which may target GAS bacteria during their initial attachment efforts to the host epithelial cells and may provide protection against a wide range of GAS serotypes. The immunogenic compositions of the invention include GAS AI surface proteins which may be formulated in an oligomeric, or hyperoligomeric (pilus) form. The immunogenic compositions of the invention may include one or more GAS AI surface proteins. The invention also includes combinations of GAS AI surface proteins. Combinations of GAS AI surface proteins may be selected from the same adhesin island or they may be selected from different GAS adhesin islands.

[0036] Amino acid sequence encoded by such GAS Adhesin Islands may be used in immunogenic compositions for the treatment or prevention of GAS infection. Preferred immunogenic compositions of the invention comprise a GAS AI surface protein which has been formulated or purified in an oligomeric (pilus) form. In a preferred embodiment, the oligomeric form is a hyperoligomer.

[0037] GAS Adhesin Islands generally include a series of open reading frames within a GAS genome that encode for a collection of surface proteins and sortases. A GAS Adhesin Island may encode for an amino acid sequence comprising at least one surface protein. The Adhesin Island, therefore, may encode at least one surface protein. Alternatively, a GAS Adhesin Island may encode for at least two surface proteins and at least one sortase. Preferably, a GAS Adhesin Island encodes for at least three surface proteins and at least two sortases. One or more of the surface proteins may include an LPXTG motif (such as LPXTG (SEQ ID NO: 122)) or other sortase substrate motif. One or more GAS AI surface proteins may participate in the formation of a pilus structure on the surface of the Gram positive bacteria.

[0038] Gas Adhesin Island of the invention preferably include a divergently transcribeds transcriptional regulator. The transcriptional regulator may regulate the expression of the GAS AI operon. Examples of transcriptional regulators found in GAS AI sequences include RofA and Nra.

[0039] The GAS AI surface proteins may bind or otherwise adhere to fibrinogen, fibronectin, or collagen. One or more of the GAS AI surface proteins may comprise a fimbrial structural subunit.

[0040] One or more of the GAS AI surface proteins may include an LPXTG motif or other sortase substrate motif. The LPXTG motif may be followed by a hydrophobic region and a charged C terminus, which are thought to retard the protein in the cell membrane to facilitate recognition by the membrane-localized sortase. See Barnett, et al., J. Bacteriology (2004) 186 (17): 5865-5875.

[0041] GAS AI sequences may be generally categorized as Type 1, Type 2, Type 3, or Type 4, depending on the number and type of sortase sequences within the island and the percentage identity of other proteins (with the exception of RofA and cpa) within the island. Schematics of the GAS adhesin islands are set forth in FIG. 51A and FIG. 162. “GAS Adhesin Island-1 or “GAS AI-1” comprises a series of approximately five open reading frames encoding for a collection of amino acid sequences comprising surface proteins and sortases (“GAS AI-1 proteins”). GAS AI-1 preferably comprises surface proteins, a srtB sortase and a rofA divergently transcribed transcriptional regulator. GAS AI-1 surface proteins may include a fibronectin binding protein, a collagen adhesion protein and a fimbrial structural subunit. The fimbrial structural subunit (also known as tee6) is thought to form the shaft portion of the pilus like structure, while the collagen adhesion protein (Cpa) is thought to act as an accessory protein facilitating the formation of the pilus structure, exposed on the surface of the bacterial capsule.

[0042] Specifically, GAS AI-1 includes polynucleotide sequences encoding for two or more of M6_Spy0157, M6_Spy0158, M6_Spy0159, M6_Spy0160, M6_Spy0161. The GAS AI-1 may also include polynucleotide sequences encoding for any one of CDC SS 410_fimbrial, ISS3650_fimbrial, DSM2071_fimbrial

[0043] A preferred immunogenic composition of the invention comprises a GAS AI-1 surface protein which may be formulated or purified in an oligomeric (pilus) form. In a preferred embodiment, the oligomeric form is a hyperoligomer. The immunogenic composition of the invention may alternatively comprise an isolated GAS AI-1 surface protein in oligomeric (pilus) form. The oligomer or hyperoligomeric pilus structures comprising GAS AI-1 surface proteins may be purified or otherwise formulated for use in immunogenic compositions.

[0044] One or more of the GAS AI-1 polynucleotide sequences may be replaced by a polynucleotide sequence coding for a fragment of the replaced ORF. Alternatively, one or more of the GAS AI-1 open reading frames may be replaced by a sequence having sequence homology (sequence identity) to the replaced ORF.

[0045] One or more of the GAS AI-1 surface proteins typically include an LPXTG motif (such as LPXTG (SEQ ID NO: 122)) or other sortase substrate motif. These sortase proteins are thought to be involved in the secretion and anchoring of the LPXTG containing surface proteins. GAS AI-1 may encode for at least one surface protein. Alternatively, GAS AI-1 may encode for at least two surface proteins and at least one sortase. Preferably, GAS AI-1 encodes for at least three surface proteins and at least two sortases. One or more of the surface proteins may include an LPXTG motif.

[0046] GAS AI-1 preferably includes a srtB sortase. GAS srtB sortases may preferably anchor surface proteins with an LPSTG motif (SEQ ID NO: 166), particularly where the motif is followed by a serine.

[0047] The GAS AI-1 protein of the composition may be selected from the group consisting of M6_Spy0157, M6_Spy0158, M6_Spy0159, M6_Spy0160 M6_Spy0161, CDC SS 410_fimbrial, ISS3650_fimbrial, and DSM2071_fimbrial. GAS AI-1 surface proteins M6_Spy0157 (a fibronectin binding protein), M6_Spy0159 (a collagen adhesion protein, Cpa), M6_Spy0160 (a fimbrial structural subunit, tee6), CDC SS 410_fimbrial (a fimbrial structural subunit), ISS3650_fimbrial (a fimbrial structural subunit), and DSM2071_fimbrial (a fimbrial structural subunit) are preferred GAS AI-1 proteins for use in the immunogenic compositions of the invention. The fimbrial structural subunit tee6 and the collagen adhesion protein Cpa are preferred GAS AI-1 surface proteins. Preferably, each of these GAS AI-1 surface proteins includes an LPXTG sortase substrate motif, such as LPXTG (SEQ ID NO: 122) or LPXSG (SEQ ID NO: 134) (conservative replacement of threonine with serine).

[0048] In addition to the open reading frames encoding the GAS AI-1 proteins, GAS AI-1 may also include a divergently transcribed transcriptional regulator such as rofA (i.e., the transcriptional regulator is located near or adjacent to the GAS AI protein open reading frames, but it transcribed in the opposite direction).

[0049] The GAS AI-1 surface proteins may be used alone, in combination with other GAS AI-1 surface proteins or in combination with other GAS AI surface proteins. Preferably, the immunogenic compositions of the invention include the GAS AI-1 fimbrial structural subunit (tee6) and the GAS AI-1 collagen binding protein. Still more preferably, the immunogenic compositions of the invention include the GAS AI-1 fimbrial structural subunit (tee6).

[0050] A second GAS adhesion island, “GAS Adhesin Island-2” or “GAS AI-2,” has also been identified in GAS serotypes. Amino acid sequences encoded by the open reading frames of GAS AI-2 may also be used in immunogenic compositions for the treatment or prevention of GAS infection.

[0051] A preferred immunogenic composition of the invention comprises a GAS AI-2 surface protein which may be formulated or purified in an oligomeric (pilus) form. In a preferred embodiment, the oligomeric form is a hyperoligomer. A preferred immunogenic composition of the invention alternatively comprises an isolated GAS AI-2 surface protein in oligomeric (pilus) form. The oligomer or hyperoligomeric pilus structures comprising GAS AI-2 surface proteins may be purified or otherwise formulated for use in immunogenic compositions.

[0052] GAS AI-2 comprises a series of approximately eight open reading frames encoding for a collection of amino acid sequences comprising surface proteins and sortases (“GAS AI-2 proteins”). GAS AI-2 preferably comprises surface proteins, a srtB sortase, a srtC1 sortase and a rofA divergently transcribed transcriptional regulator.

[0053] Specifically, GAS AI-2 includes polynucleotide sequences encoding for two or more of GAS15, Spy0127, GAS16, GAS17, GAS18, Spy0131, Spy0133, and GAS20.

[0054] One or more of the GAS AI-2 polynucleotide sequences may be replaced by a polynucleotide sequence coding for a fragment of the replaced ORF. Alternatively, one or more of the GAS AI-2 open reading frames may be replaced by a sequence having sequence homology (sequence identity) to the replaced ORF.

[0055] One or more of the GAS AI-2 surface proteins typically include an LPXTG motif (such as LPXTG (SEQ ID NO: 122)) or other sortase substrate motif. These sortase proteins are thought to be involved in the secretion and anchoring of the LPXTG containing surface proteins. GAS AI-2 may encode for at least one surface protein. Alternatively, GAS AI-2 may encode for at least two surface proteins and at least one sortase. Preferably, GAS AI-2 encodes for at least three surface proteins and at least two sortases. One or more of the surface proteins may include an LPXTG, motif.

[0056] GAS AI-2 preferably includes a srtB sortase and a srtC1 sortase. As discussed above, GAS srtB sortases may preferably anchor surface proteins with an LPSTG motif (SEQ ID NO: 166), particularly where the motif is followed by a serine. GAS srtC1 sortase may preferentially anchor surface proteins with a V(P/V)PTG (SEQ ID NO:167) motif. GAS srtC1 may be differentially regulated by rofA.

[0057] The GAS AI-2 protein of the composition may be selected from the group consisting of GAS15, Spy0127, GAS16, GAS17, GAS18, Spy0131, Spy0133, and GAS20. GAS AI-2 surface proteins GAS15 (Cpa), GAS16 (thought to be a fimbrial protein, M1_{—}128), GAS18 (M1_Spy0130), and GAS20 are preferred for use in the immunogenic compositions of the invention. GAS 16 is thought to form the shaft portion of the pilus like structure, while GAS 15 (the collagen adhesion protein Cpa) and GAS 18 are thought to act as accessory proteins facilitating the formation of the pilus structure, exposed on the surface of the bacterial capsule. Preferably, each of these GAS AI-2 surface proteins includes an UPXTG sortase substrate motif, such as LPXTG (SEQ ID NO: 122), VVXTG (SEQ ID NO: 135), or EVXTG (SEQ ID NO: 136).

[0058] In addition to the open reading frames encoding the GAS AI-2 proteins, GAS AI-2 may also include a divergently transcribed transcriptional regulator such as rofA (i.e., the transcriptional regulator is located near or adjacent to the GAS AI protein open reading frames, but it transcribed in the opposite direction). The GAS AI-2 surface proteins may be used alone, in combination with other GAS AI-2 surface proteins or in combination with other GAS AI surface proteins. Preferably, the immunogenic compositions of the invention include the GAS AI-2 fimbrial protein (GAS 16), the GAS AI-2 collagen binding protein (GAS 15) and GAS18 (M1_Spy0130). More preferably, the immunogenic compositions of the invention include the GAS AI-2 fimbrial protein (GAS 16).

[0059] A third GAS adhesion island, “GAS Adhesin Island-3” or “GAS AI-3,” has also been identified in numerous GAS serotypes. Amino acid sequences encoded by the open reading frames of GAS AI-3may also be used in immunogonic compositions for the treatment or prevention of GAS infection.

[0060] A preferred immunogenic composition of the invention comprises a GAS AI-3 surface protein which may be formulated or purified in an oligomeric (pilus) form. In a preferred embodiment, the oligomeric form is a hyperoligomer. A preferred immunogenic composition of the invention alternatively comprises an isolated GAS AI-3 surface protein in oligomeric (pilus) form. The oligomer or hyperoligomeric pilus structures comprising GAS AI-3 surface proteins may be purified or otherwise formulated for use in immunogenic compositions. GAS AI-3 comprises a series of approximately seven open reading frames encoding for a collection of amino acid sequences comprising surface proteins and sortases (“GAS AI-3 proteins”). GAS AI-3 preferably comprises surface proteins, a srtC2 sortase, and a Negative transcriptional regulator (Nra) divergently transcribed transcriptional regulator. GAS AI-3 surface proteins may include a collagen binding protein, a fimbrial protein, and a F2 like fibronectin-binding protein. GAS AI-3 surface proteins may also include a hypothetical surface protein. The fimbrial protein is thought to form the shaft portion of the pilus like structure, while the collagen adhesion protein (Cpa) and the hypothetical surface protein are thought to act as accessory proteins facilitating the formation of the pilus structure, exposed on the surface of the bacterial capsule. Preferred AI-3 surface proteins include the fimbrial protein, the collagen binding protein and the hypothetical protein. Preferably, each of these GAS AI-3 surface proteins include an LPXTG sortase substrate motif, such as LPXTG (SEQ ID NO: 122), VPXTG (SEQ ID NO: 137), QVXTG (SEQ ID NO: 138) or LPXAG (SEQ ID NO: 139).

[0061] Specifically, GAS AI-3 includes polynucleotide sequences encoding for two or more of SpyM3_{—}0098, SpyM3_{—}0099, SpyM3_{—}0100, SpyM3_{—}0101, SpyM3_{—}0102, SpyM3_{—}0103, SpyM3_{—}0104, Sps0100, Sps0101, Sps0102, Sps0103, Sps0104, Sps0105, Sps0106, orf78, orf79, orf80, orf81, orf82, orf83, orf84, spyM18_{—}0126, spyM18_{—}0127, spyM18_{—}0128, spyM18_{—}0129, spyM18_{—}0130, spyM18_{—}0131, spyM18_{—}0132, SpyoM01000156, SpyoM01000155, SpyoM01000154, SpyoM01000153, SpyoM01000152, SpyoM01000151, SpyoM01000150, SpyoM01000149, ISS3040_fimbrial, ISS3776_fimbrial, and ISS4959_fimbrial. In one embodiment, GAS AI-3 may include open reading frames encoding for two or more of SpyM3_{—}0098, SpyM3_{—}0099, SpyM3_{—}0100, SpyM3_{—}0101, SpyM3_{—}0102, SpyM3_{—}0103, and SpyM3_{—}0104. Alternatively, GAS AI-3 may include open reading frames encoding for two or more of Sps0100, Sps0101, Sps0102, Sps0103, Sps0104, Sps0105, and Sps0106. Alternatively, GAS AI-3 may include open reading frames encoding for two or more of orf78, orf79, orf80, orf81, orf82, orf83, and orf84. Alternatively, GAS AI-3 may include open reading frames encoding for two or more of spyM18_{—}0126, spyM18_{—}0127, spyM18_{—}0128, spyM18_{—}0129, spyM18_{—}0130, spyM18_{—}0131, and spyM18_{—}0132. Alternatively, GAS AI-3 may include open reading frames encoding for two or more of SpyoM01000156, SpyoM01000155, SpyoM01000154, SpyoM01000153, SpyoM01000152, SpyoM01000151, SpyoM01000150, and SpyoM01000149. Alternatively, GAS AI-1 may also include polynucleotide sequences encoding for any one of ISS3040_fimbrial, ISS3776_fimbrial, and ISS4959_fimbrial.

[0062] One or more of the GAS AI-3 polynucleotide sequences may be replaced by a polynucleotide sequence coding for a fragment of the replaced ORF. Alternatively, one or more of the GAS AI-3 open reading frames may be replaced by a sequence having sequence homology (sequence identity) to the replaced ORF.

[0063] One or more of the GAS AI-3 surface proteins typically include an LPXTG motif (such as LPXTG (SEQ ID NO: 122)) or other sortase substrate motif. These sortase proteins are thought to be involved in the secretion and anchoring of the LPXTG containing surface proteins. GAS AI-3 may encode for at least one surface protein. Alternatively, GAS AI-3 may encode for at least two surface proteins and at least one sortase. Preferably, GAS AI-3 encodes for at least three surface proteins and at least two sortases. One or more of the surface proteins may include an LPXTG motif.

[0064] GAS AI-3 preferably includes a srtC2 type sortase. GAS srtC2 type sortases may preferably anchor surface proteins with a QVPTG (SEQ ID NO: 140) motif, particularly when the motif is followed by a hydrophobic region and a charged C terminus tail. GAS SrtC2 may be differentially regulated by Nra.

[0065] The GAS AI-3 protein of the composition may be selected from the group consisting of SpyM3_{—}0098, SpyM3_{—}0099, SpyM3_{—}0100, SpyM3_{—}0101, SpyM3_{—}0102, SpyM3_{—}0103, SpyM3_{—}0104, Sps0100, Sps0101, Sps0102, Sps0103, Sps0104, Sps0105, Sps0106, orf78, orf79, orf80, orf81, orf82, orf83, orf84, spyM18_{—}0126, spyM18_{—}0127, spyM18_{—}0128, spyM18_{—}0129, spyM18_{—}0130, spyM18_{—}0131, spyM18_{—}0132, SpyoM01000156, SpyoM01000155, SpyoM01000154, SpyoM01000153, SpyoM01000152, SpyoM01000151, SpyoM01000150, SpyoM01000149, ISS3040_fimbrial, ISS3776_fimbrial, and ISS4959_fimbrial. GAS AI-3 surface proteins SpyM3_{—}0098, SpyM3_{—}0100, SpyM3_{—}0102, SpyM3_{—}0104, SPs0100, SPs0102, SPs0104, SPs0106, orf78, orf80, orf82, orf84, spyM18_{—}0126, spyM18_{—}0128, spyM18_{—}0130, spyM18_{—}0132, SpyoM01000155, SpyoM01000153, SpyoM01000151, SpyoM01000149, ISS3040_fimbrial, ISS3776_fimbrial, and ISS4959_fimbrial are preferred GAS AI-3 proteins for use in the immunogenic compositions of the invention.

[0066] In addition to the open reading frames encoding the GAS AI-3 proteins, GAS AI-3 may also include a transcriptional regulator such as Nra.

[0067] GAS AI-3 may also include a LepA putative signal peptidase I protein.

[0068] The GAS AI-3 surface proteins may be used alone, in combination with other GAS AI-3 surface proteins or in combination with other GAS AI surface proteins. Preferably, the immunogenic compositions of the invention include the GAS AI-3 fimbrial protein, the GAS AI-3 collagen binding protein, the GAS AI-3 surface protein (such as SpyM3_{—}0102, M3_Sps0104, M5_orf82, or spyM18_{—}0130), and fibronectin binding protein PrtF2. More preferably, the immunogenic compositions of the invention include the GAS AI-3 fimbrial protein, the GAS AI-3 collagen binding protein, and the GAS AI-3 surface protein. Still more preferably, the immunogenic compositions of the invention include the GAS AI-3 fimbrial protein.

[0069] Representative examples of the GAS AI-3 fimbrial protein include SpyM3_{—}0100, M3_Sps0102, M5_orf80, spyM18_{—}128, SpyoM01000153, ISS3040_fimbrial, ISS3776_fimbrial, ISS4959_fimbrial.

[0070] Representative examples of the GAS AI-3 collagen binding protein include SpyM3_{—}0098, M3_Sps0100, M5_orf78, spyM18_{—}0126, and SpyoM01000155.

[0071] Representative examples of the GAS AI-3 fibronectin binding protein PrtF2 include SpyM3_{—}0104, M3_Sps0106, M5_orf84 and spyM18_{—}0132, and SpyoM01000149.

[0072] A fourth GAS adhesion island, “GAS Adhesin Island-4” or “GAS AI-4,” has also been identified in GAS serotypes. Amino acid sequences encoded by the open reading frames of GAS AI-4 may also be used in immunogenic compositions for the treatment or prevention of GAS infection.

[0073] A preferred immunogenic composition of the invention comprises a GAS AI-4 surface protein which may be formulated or purified in an oligomeric (pilus) form. In a preferred embodiment, the oligomeric form is a hyperoligomer. A preferred immunogenic composition of the invention alternatively comprises an isolated GAS AI-4 surface protein in oligomeric (pilus) form. The oligomer or hyperoligomeric pilus structures comprising GAS AI-3 surface proteins may be purified or otherwise formulated for use in immunogenic compositions. The oligomeric or hyperoligomeric pilus structures comprising GAS AI-4 surface proteins may be purified or otherwise formulated for use in immunogenic compositions.

[0074] GAS AI-4 comprises a series of approximately eight open reading frames encoding for a collection of amino acid sequences comprising surface proteins and sortases (“GAS AI-4 proteins”). This GAS adhesin island 4 (“GAS AI-4”) comprises surface proteins, a srtC2 sortase, and a RofA regulatory protein. GAS AI-4 surface proteins within may include a fimbrial protein, F1 and F2 like fibronectin-binding proteins, and a capsular polysaccharide adhesion protein (cpa). GAS AI-4 surface proteins may also include a hypothetical surface protein in an open reading frame (orf).

[0075] The fimbral protein (EftLSL) is thought to form the shaft portion of the pilus like structure, while the collagen adhesion protein (Cpa) and the hypothetical protein are thought to act as accessory proteins facilitating the formation of the pilus structure, exposed on the surface of the bacterial capsule. Preferably, each of these GAS AI-4 surface proteins include an LPXTG sortase substrate motif, such as LPXTG (SEQ ID NO: 122), VPXTG (SEQ ID NO: 137), QVXTG (SEQ ID NO: 138) or LPXAG (SEQ ID NO: 139).

[0076] Specifically, GAS AI-4 includes polynucleotide sequences encoding for two or more of 19224134, 19224135, 19224136, 19224137, 19224138, 19224139, 19224140, and 19224141. A GAS AI-4 polynucleotide may also include polynucleotide sequences encoding for any one of 20010296_fimbrial, 20020069_fimbrial, CDC SS 635_fimbrial, ISS4883_fimbrial, ISS4538_fimbrial. One or more of the GAS AI-4 polynucleotide sequences may be replaced by a polynucleotide sequence coding for a fragment of the replaced ORF. Alternatively, one or more of the GAS AI-4 open reading frames may be replaced by a sequence having sequence homology (sequence identity) to the replaced ORF.

[0077] One or more of the GAS AI-4 surface proteins typically include an LPXTG motif (such as LPXTG (SEQ ID NO: 122)) or other sortase substrate motif. These sortase proteins are thought to be involved in the secretion and anchoring of the LPXTG containing surface proteins. GAS AI-4 may encode for at least one surface protein. Alternatively, GAS AI-4 may encode for at least two surface proteins and at least one sortase. Preferably, GAS AI-4 encodes for at least three surface proteins and at least two sortases. One or more of the surface proteins may include an LPXTG motif.

[0078] GAS AI-4 includes a SrtC2 type sortase. GAS SrtC2 type sortases may preferably anchor surface proteins with a QVPTG (SEQ ID NO: 140) motif, particularly when the motif is followed by a hydrophobic region and a charged C terminus tail.

[0079] The GAS AI-4 protein of the composition may be selected from the group consisting of 19224134, 19224135, 19224136, 19224137, 19224138, 19224139, 19224140, 19224141, 20010296_fimbrial, 20020069_fimbrial, CDC SS 635_fimbrial, ISS4883_fimbrial, and ISS4538_fimbrial. GAS AI-4 surface proteins 19224134, 19224135, 19224137, 19224139, 19224141, 20010296_fimbrial, 20020069_fimbrial, CDC SS 635_fimbrial, ISS4883_fimbrial, ISS4538_fimbrial are preferred proteins for use in the immunogenic compositions of the invention.

[0080] In addition to the open reading frames encoding the GAS AI-4 proteins, GAS AI-4 may also include a divergently transcribed transcriptional regulator such as RofA (i.e., the transcriptional regulator is located near or adjacent to the AI protein open reading frames, but it transcribed in the opposite direction.

[0081] GAS AI-4 may also include a LepA putative signal peptidase I protein and a MsmRL protein. The GAS AI-4 surface proteins may be used alone, in combination with other GAS AI-4 surface proteins or in combination with other GAS AI surface proteins. Preferably, the immunogenic compositions of the invention include the GAS AI-4 fimbrial protein (EftLSL or 20010296_fimbrial, 20020069_fimbrial, CDC SS 635_fimbrial, ISS4883_fimbrial, or ISS4538_fimbrial), the GAS AI-4 collagen binding protein, the GAS AI-4 surface protein (such as M12 isolate A735 orf 2), and fibronectin binding protein PrtF1 and PrtF2. More preferably, the immunogenic compositions of the invention include the GAS AI-4 fimbrial protein, the GAS AI-4 collagen binding protein, and the GAS AI-4 surface protein. Still more preferably, the immunogenic compositions of the invention include the GAS AI-4 fimbrial protein.

[0082] The GAS AI proteins of the invention may be used in immunogenic compositions for prophylactic or therapeutic immunization against GAS infection. For example, the invention may include an immunogenic composition comprising one or more GAS AI-1 proteins and one or more of any of GAS AI-2, GAS AI-3, or GAS AI-4 proteins. For example, the invention includes an immunogenic composition comprising at least two GAS AI proteins where each protein is selected from a different GAS adhesin island. The two GAS AI proteins may be selected from one of the following GAS AI combinations: GAS AI-1 and GAS AI-2; GAS AI-1 and GAS AI-3; GAS AI-1 and GAS AI-4; GAS AI-2 and GAS AI-3; GAS AI-2 and GAS AI-4; and GAS AI 3 and GAS AI-4. Preferably the combination includes fimbrial proteins from one or more GAS adhesin islands.

[0083] The immunogenic compositions may also be selected to provide protection against an increased range of GAS serotypes and strain isolates. For example, the immunogenic composition may comprise a first and second GAS AI protein, wherein a full length polynucleotide sequence encoding for the first GAS AI protein is not present in a genome comprising a full length polynucleotide sequence encoding for the second GAS AI protein. In addition, each antigen selected for use in the immunogenic compositions will preferably be present in the genomes of multiple GAS serotypes and strain isolates. Preferably, each antigen is present in the genomes of at least two (i.e., 3, 4, 5, 6, 7, 8, 9, 10, or more) GAS strain isolates. More preferably, each antigen is present in the genomes of at least two (i.e., at least 3, 4, 5, or more) GAS serotypes.

[0084] Applicants have also identified adhesin islands within the genome of Streptococcus pneumoniae. These adhesion islands are thought to encode surface proteins which are important in the bacteria's virulence. Amino acid sequence encoded by such S. pneumoniae Adhesin Islands may be used in immunogenic compositions for the treatment or prevention of S. pneumoniae infection. Preferred immunogenic compositions of the invention comprise a S. pneumoniae AI surface protein which has been formulated or purified in an oligomeric (pilus) form. In a preferred embodiment, the oligomeric form is a hyperoligomer. A preferred immunogenic composition of the invention alternatively comprises an isolated S. pneumoniae surface protein in oligomeric (pilus) form. The oligomer or hyperoligomeric pilus structures comprising S. pneumoniae surface proteins may be purified or otherwise formulated for use in immunogenic compositions.

[0085] The S. pneumoniae Adhesin Islands generally include a series of open reading frames within a S. pneumoniae genome that encode for a collection of surface proteins and sortases. A S. pneumoniae Adhesin Island may encode for an amino acid sequence comprising at least one surface protein. Alternatively, the S. pneumoniae Adhesin Island may encode for at least two surface proteins and at least one sortase. Preferably, a S. pneumoniae Adhesin Island encodes for at least three surface proteins and at least two sortases. One or more of the surface proteins may include an LPTXG motif (such as LPXTG (SEQ ID NO: 122)) or other sortase substrate motif. One or more S. pneumoniae AI surface proteins may participate in the formation of a pilus structure on the surface of the S. pneumoniae bacteria.

[0086] The S. pneumoniae Adhesin Islands of the invention preferably include a divergently transcribed transcriptional regulator. The transcriptional regulator may regulate the expression of the S. pneumonaie AI operon. An example of a transcriptional regulator found in S. pneumoniae AI sequences is rlrA.

[0087] A schematic of the organization of a S. pneumoniae AI locus is provided in FIG. 137. The locus comprises open reading frames encoding a transcriptional regulator (rlrA), cell wall surface proteins (rrgA, rrgB, rrgC) and sortases (srt B, srtC, srtD).

[0088] S. pneumoniae AI sequences may be generally divided into two groups of homology, S. pneumoniae AI-a and AI-b. S. pneumoniae strains that comprise AI-a include 14 CSR 10, 19A Hungary 6, 23 F Poland 15, 670, 6B Finland 12, and 6B Spain 2. S. pneumoniae AI strains that comprise AI-b include 19F Taiwan 14, 9V Spain 3, 23F Taiwan 15 and TIGR 4.

[0089] S. pneumoniae AI from TIGR4 comprises a series of approximately seven open reading frames encoding for a collection of amino acid sequences comprising surface proteins and sortases (“S. pneumoniae AI proteins”). Specifically, S. pneumoniae AI from TIGR4 includes polynucleotide sequences encoding for two or more of SP0462, SP0463, SP0464, SP0465, SP0466, SP0467, and SP0468.

[0090] One or more of the S. pneumoniae AI from TIGR4 polynucleotide sequences may be replaced by a polynucleotide sequence coding for a fragment of the replaced ORF. Alternatively, one or more of the S. pneumoniae AI from TIGR4 open reading frames may be replaced by a sequence having sequence homology to the replaced ORF.

[0091] S. pneumoniae strain 670 AI comprises a series of approximately seven open reading frames encoding for a collection of amino acid sequences comprising surface proteins and sortases (“S. pneumoniae AI proteins”). Specifically, S. pneumoniae strain 670 AI includes polynucleotide sequences encoding for two or more of orf1_{—}670, orf3_{—}670, orf4_{—}670, orf5_{—}670, orf6_{—}670, orf7_{—}670, and orf8_{—}670.

[0092] One or more of the S. pneumoniae strain 670 AI polynucleotide sequences may be replaced by a polynucleotide sequence coding for a fragment of the replaced ORF. Alternatively, one or more of the S. pneumoniae strain 670 AI open reading frames may be replaced by a sequence having sequence homology to the replaced ORF.

[0093] S. pneumoniae AI from 14 CSR10 comprises a series of approximately seven open reading frames encoding for a collection of amino acid sequences comprising surface proteins and sortases (“S. pneumoniae AI proteins”). Specifically, S. pneumoniae AI from 14 CSR10 includes polynucleotide sequences encoding for two or more of ORF2_{—}14CSR, ORF3_{—}14CSR, ORF4_{—}14CSR, ORF5_{—}14CSR, ORF6_{—}14CSR, ORF7_{—}14CSR, and ORF8_{—}14CSR.

[0094] One or more of the S. pneumoniae AI from 14 CSR10 polynucleotide sequences may be replaced by a polynucleotide sequence coding for a fragment of the replaced ORF. Alternatively, one or more of the S. pneumoniae AI from 14 CSR10 open reading frames may be replaced by a sequence having sequence homology to the replaced ORF.

[0095] S. pneumoniae AI from 19A Hungary 6 comprises a series of approximately seven open reading frames encoding for a collection of amino acid sequences comprising surface proteins and sortases (“S. pneumoniae AI proteins”). Specifically, S. pneumoniae AI from 19A Hungary 6 includes polynucleotide sequences encoding for two or more of ORF2_{—}19AH, ORF3_{—}19AH, ORF4_{—}19AH, ORF5_{—}19AH, ORF6_{—}19AH, ORF7_{—}19AH, and ORF8_{—}19AH.

[0096] One or more of the S. pneumoniae AI from 19A Hungary 6 polynucleotide sequences may be replaced by a polynucleotide sequence coding for a fragment of the replaced ORF. Alternatively, one or more of the S. pneumoniae AI from 19A Hungary 6 open reading frames may be replaced by a sequence having sequence homology to the replaced ORF.

[0097] S. pneumoniae AI from 19F Taiwan 14 comprises a series of approximately seven openreading frames encoding for a collection of amino acid sequences comprising surface proteins and sortases (“S. pneumoniae AI proteins”). Specifically, S. pneumoniae AI from 19F Taiwan 14 includes polynucleotide sequences encoding for two or more of ORF2_{—}19FTW, ORF3_{—}19FTW, ORF4_{—}19FTW, ORF5_{—}19FTW, ORF6_{—}19FTW, ORF7_{—}19FTW, and ORF8_{—}19FTW.

[0098] One or more of the S. pneumoniae AI from 19F Taiwan 14 polynucleotide sequences may be replaced by a polynucleotide sequence coding for a fragment of the replaced ORF. Alternatively, one or more of the S. pneumoniae AI from 19F Taiwan 14 open reading frames may be replaced by a sequence having sequence homology to the replaced ORF.

[0099] S. pneumoniae AI from 23F Poland 16 comprises a series of approximately seven open reading frames encoding for a collection of amino acid sequences comprising surface proteins and sortases (“S. pneumoniae AI proteins”). Specifically, S. pneumoniae AI from 23F Poland 16 includes polynucleotide sequences encoding for two or more of ORF2_{—}23FP, ORF3_{—}23FP, ORF4_{—}23FP, ORF5_{—}23FP, ORF6_{—}23FP, ORF7_{—}23FP, and ORF8_{—}23FP.

[0100] One or more of the S. pneumoniae AI from 23F Poland 16 polynucleotide sequences may be replaced by a polynucleotide sequence coding for a fragment of the replaced ORF. Alternatively, one or more of the S. pneumoniae AI from 23F Poland 16 open reading frames may be replaced by a sequence having sequence homology to the replaced ORF.

[0101] S. pneumoniae AI from 23F Taiwan 15 comprises a series of approximately seven open reading frames encoding for a collection of amino acid sequences comprising surface proteins and sortases (“S. pneumoniae AI proteins”). Specifically, S. pneumoniae AI from 23F Taiwan 15 includes polynucleotide sequences encoding for two or more of ORF2_{—}23FTW, ORF3_{—}23FTW, ORF4_{—}23FTW, ORF5_{—}23FTW, ORF6_{—}23FTW, ORF7_{—}23FTW, and ORF8_{—}23FTW.

[0102] One or more of the S. pneumoniae AI from 23F Taiwan 15 polynucleotide sequences may be replaced by a polynucleotide sequence coding for a fragment of the replaced ORF. Alternatively, one or more of the S. pneumoniae AI from 23F Taiwan 15 open reading frames may be replaced by a sequence having sequence homology to the replaced ORF.

[0103] S. pneumoniae AI from 6B Finland 12 comprises a series of approximately seven open reading frames encoding for a collection of amino acid sequences comprising surface proteins and sortases (“S. pneumoniae AI proteins”). Specifically, S. pneumoniae AI from 6B Finland 12 includes polynucleotide sequences encoding for two or more of ORF2_{—}6BF, ORF3_{—}6BF, ORF4_{—}6BF, ORF5_{—}6BF, ORF6_{—}6BF, ORF7_{—}6BF, and ORF8_{—}6BF.

[0104] One or more of the S. pneumoniae AI from 6B Finland 12 polynucleotide sequences may be replaced by a polynucleotide sequence coding for a fragment of the replaced ORF. Alternatively, one or more of the S. pneumoniae AI from 6B Finland 12 open reading frames may be replaced by a sequence having sequence homology to the replaced ORF.

[0105] S. pneumoniae AI from 6B Spain 2 comprises a series of approximately seven open reading frames encoding for a collection of amino acid sequences comprising surface proteins and sortases (“S. pneumoniae AI proteins”). Specifically, S. pneumoniae AI from 6B Spain 2 includespolynucleotide sequences encoding for two or more of ORF2_{—}6BSP, ORF3_{—}6BSP, ORF4_{—}6BSP, ORF5_{—}6BSP, ORF6_{—}6BSP, ORF7_{—}6BSP, and ORF8_{—}6BSP.

[0106] One or more of the S. pneumoniae AI from 6B Spain 2 polynucleotide sequences may be replaced by a polynucleotide sequence coding for a fragment of the replaced ORF. Alternatively, one or more of the S. pneumoniae AI from 6B Spain 2 open reading frames may be replaced by a sequence having sequence homology to the replaced ORF.

[0107] S. pneumoniae AI from 9V Spain 3 comprises a series of approximately seven open reading frames encoding for a collection of amino acid sequences comprising surface proteins and sortases (“S. pneumoniae AI proteins”). Specifically, S. pneumoniae AI from 9V Spain 3 includes polynucleotide sequences encoding for two or more of ORF2_{—}9VSP, ORF3_{—}9VSP, ORF4_{—}9VSP, ORF5_{—}9VSP, ORF6_{—}9VSP, ORF7_{—}9VSP, and ORF8_{—}9VSP.

[0108] One or more of the S. pneumoniae AI from 9V Spain 3 polynucleotide sequences may be replaced by a polynucleotide sequence coding for a fragment of the replaced ORF. Alternatively, one or more of the S. pneumoniae AI from 9V Spain 3 open reading frames may be replaced by a sequence having sequence homology to the replaced ORF.

[0109] One or more of the S. pneumoniae AI surface proteins typically include an LPXTG motif (such as LPXTG (SEQ ID NO: 122)) or other sortase substrate motif. These sortase proteins are thought to be involved in the secretion and anchoring of the LPXTG containing surface proteins. S. pneumoniae AI may encode for at least one surface protein. The Adhesin Island, may encode at least one surface protein. Alternatively, S. pneumoniae AI may encode for at least two surface proteins and at least one sortase. Preferably, S. pneumoniae AI encodes for at least three surface proteins and at least two sortases. One or more of the surface proteins may include an LPXTG motif.

[0110] The S. pneumoniae AI protein of the composition may be selected from the group consisting of SP0462, SP0463, SP0464, SP0465, SP0466, SP0467, SP0468, orf1_{—}670, orf3_{—}670, orf4_{—}670, orf5_{—}670, orf6_{—}670, orf7_{—}670, orf8_{—}670, ORF2_{—}14CSR, ORF3_{—}14CSR, ORF4_{—}14CSR, ORF5_{—}14CSR, ORF6_{—}14CSR, ORF7_{—}14CSR, ORF8_{—}14CSR, ORF2_{—}19AH, ORF3_{—}19AH, ORF4_{—}19AH, ORF5_{—}19AH, ORF6_{—}19AH, ORF7_{—}19AH, ORF8_{—}19AH, ORF2_{—}19FTW, ORF3_{—}19FTW, ORF4_{—}19FTW, ORF5_{—}19FTW, ORF6_{—}19FTW, ORF7_{—}19FTW, ORF8_{—}19FTW, ORF2_{—}23FP, ORF3_{—}23FP, ORF4_{—}23FP, ORF5_{—}23FP, ORF6_{—}23FP, ORF7_{—}23FP, ORF8_{—}23FP, ORF2_{—}23FTW, ORF3_{—}23FTW, ORF4_{—}23FTW, ORF5_{—}23FTW, ORF6_{—}23FTW, ORF7_{—}23FTW, ORF8_{—}23FTW, ORF2_{—}6BF, ORF3_{—}6BF, ORF4_{—}6BF, ORF5_{—}6BF, ORF6_{—}6BF, ORF7_{—}6BF, ORF8_{—}6BF, ORF2_{—}6BSP, ORF3_{—}6BSP, ORF4_{—}6BSP, ORF5_{—}6BSP, ORF6_{—}6BSP, ORF7_{—}6BSP, ORF8_{—}6BSP, ORF2_{—}9VSP, ORF3_{—}9VSP, ORF4_{—}9VSP, ORF5_{—}9VSP, ORF6_{—}9VSP, ORF7_{—}9VSP and, ORF8_{—}9VSP.

[0111] S. pneumoniae AI surface proteins are preferred proteins for use in the immunogenic compositions of the invention. In one embodiment, the compositions of the invention comprise combinations of two or more S pneumoniae AI surface proteins. Preferably such combinations are selected from two or more of the group consisting of SP0462, SP0463, SP0464, orf3_{—}670, orf4_{—}670, orf5_{—}670, ORF3_{—}14CSR, ORF4_{—}14CSR, ORF5_{—}14CSR, ORF3_{—}19AH, ORF4_{—}19AH, ORF5_{—}19AH, ORF3_{—}19FTW, ORF4_{—}19FTW, ORF5_{—}9FTW, ORF3_{—}23FP, ORF4_{—}23FP, ORF5_{—}23FP, ORF3_{—}23FW, ORF4_{—}23FTW, ORF5_{—}23FTW, ORF3_{—}6BF, ORF4_{—}6BF, ORF5_{—}6BF, ORF3_{—}6BSP, ORF4_{—}6BSP, ORF5_{—}6BSP, ORF3_{—}9VSP, ORF4_{—}9VSP, and ORF5_{—}9VSP.

[0112] In addition to the open reading frames encoding the S. pneumoniae AI proteins, S. pneumoniae AI may also include a transcriptional regulator.

[0113] The S. pneumoniae AI proteins of the invention may be used in immunogenic compositions for prophylactic or therapeutic immunization against S. pneumoniae infection. For example, the invention may include an immunogenic composition comprising one or more S. pneumoniae from TIGR4 AI proteins and one or more S. pneumoniae strain 670 proteins. The immunogenic composition may comprise one or more AI proteins from any one or more of S. pneumoniae strains TIGR4, 19A Hungary 6, 6B Finland 12, 6B Spain 2, 9V Spain 3, 14 CSR 10, 19F Taiwan 14, 23F Taiwan 15, 23F Poland 16, and 670.

[0114] The immunogenic compositions may also be selected to provide protection against an increased range of S. pneumoniae serotypes and strain isolates. For example, the immunogenic composition may comprise a first and second S. pneumoniae AI protein, wherein a full length polynucleotide sequence encoding for the first S. pneumoniae AI protein is not present in a genome comprising a full length polynucleotide sequence encoding for the second S. pneumoniae AI protein. In addition, each antigen selected for use in the immunogenic compositions will preferably be present in the genomes of multiple S. pneumoniae serotypes and strain isolates. Preferably, each antigen is present in the genomes of at least two (i.e., 3, 4, 5, 6, 7, 8, 9, 10, or more) S. pneumoniae strain isolates. More preferably, each antigen is present in the genomes of at least two (i.e., at least 3, 4, 5, or more) S. pneumoniae serotypes.

[0115] The immunogenic compositions may also be selected to provide protection against an increased range of serotypes and strain isolates of a Gram positive bacteria. For example, the immunogenic composition may comprise a first and second Gram positive bacteria AI protein, wherein a full length polynucleotide sequence encoding for the first Gram positive bacteria AI protein is not present in a genome comprising a full length polynucleotide sequence encoding for the second Gram positive bacteria AI protein. In addition, each antigen selected for use in the immunogenic compositions will preferably be present in the genomes of multiple serotypes and strain isolates of the Gram positive bacteria. Preferably, each antigen is present in the genomes of at least two (i.e., 3, 4, 5, 6, 7, 8, 9, 10, or more) Gram positive bacteria strain isolates. More preferably, each antigen is present in the genomes of at least two (i.e., at least 3, 4, 5, or more) Gram positive bacteria serotypes. One or both of the first and second AI proteins may preferably be in oligomeric or hyperoligomeric form.

[0116] Adhesin island surface proteins from two or more Gram positive bacterial genus or species may be combined to provide an immunogenic composition for prophylactic or therapeutic treatment of disease or infection of two more Gram positive bacterial genus or species. Optionally, the adhesin island surface proteins may be associated together in an oligomeric or hyperoligomeric structure.

[0117] In one embodiment, the invention comprises adhesin island surface proteins from two or more Streptococcus species. For example, the invention includes a composition comprising a GBS AI surface protein and a GAS adhesin island surface protein. As another example, the invention includes a composition comprising a GAS adhesin island surface protein and a S. pneumoniae adhesin island surface protein. One or both of the GAS AI surface protein and the S. pneumoniae AI surface protein may be in oligomeric or hyperoligomeric form. As a further example, the invention includes a composition comprising a GBS adhesin island surface protein and a S. pneumoniae adhesin island surface protein.

[0118] In one embodiment, the invention comprises an adhesin island surface protein from two or more Gram positive bacterial genus. For example, the invention includes a composition comprising a Streptococcus adhesin island protein and a Corynebacterium adhesin island protein. One or more of the Gram positive bacteria AI surface proteins may be in an oligomeric or hyperoligomeric form.

[0119] In addition, the AI polynucleotides and amino acid sequences of the invention may also be used in diagnostics to identify the presence or absence of GBS (or a Gram positive bacteria) in a biological sample. They may be used to generate antibodies which can be used to identify the presence of absence of an AI protein in a biological sample or in a prophylactic or therapeutic treatment for GBS (or a Gram positive bacterial) infection. Further, the AI polynucleotides and amino acid sequences of the invention may also be used to identify small molecule compounds which inhibit or decrease the virulence associated activity of the AI.

### BRIEF DESCRIPTION OF THE FIGURES

[0120] FIG. 1 presents a schematic depiction of Adhesin Island 1 (“AI-1”) comprising open reading frames for GBS 80, GBS 52, SAG0647, SAG0648 and GBS 104.

[0121] FIG. 2 illustrates the identification of AI-1 sequences in several GBS serotypes and strain isolates (GBS serotype V, strain isolate 2603; GBS serotype III, strain isolate nem316; GBS serotype II, strain isolate 18RS21; GBS serotype V, strain isolate CJB111; GBS serotype III, strain isolate COH1 and GBS serotype 1a, strain isolate A909). (An AI-1 was not identified in GBS serotype 1b, strain isolate H36B or GBS serotype 1a, strain isolate 515).

[0122] FIG. 3 presents a schematic depiction of the correlation between AI-1 and the Adhesin Island 2 (“AI-2”) within the GBS serotype V, strain isolate 2603 genome. (This AI-2 comprises open reading frames for GBS 67, GBS 59, SAG1406, SAG1405 and GBS 150).

[0123] FIG. 4 illustrates the identification of AI-2 comprising open reading frames encoding for GBS 67, GBS 59, SAG1406, SAG1404 and GBS 150 (or sequences having sequence homology thereto) in several GBS serotypes and strain isolates (GBS serotype V, strain isolate 2603; GBS serotype II, strain isolate NEM316; GBS serotype 1b, strain isolate H36B; GBS serotype V, strain isolate CJB111; GBS serotype U, strain isolate 18RS21; and GBS serotype 1a, strain isolate 515). FIG. 4 also illustrates the identification of AI-2 comprising open reading frames encoding for 01520 (a sortase), 01521, 01522, (a sortase), 01523 (spb1), 01524 and 01525 (or sequences having sequence homology thereto).

[0124] FIG. 5 presents data showing that GBS 80 binds to fibronectin and fibrinogen in ELISA.

[0125] FIG. 6 illustrates that all genes in AI-1 are co-transcribed as an operon.

[0126] FIG. 7 presents schematic depictions of in-frame deletion mutations within AI-1.

[0127] FIG. 8 presents FACS data showing that GBS 80 is required for surface localization of GBS 104.

[0128] FIG. 9 presents FACS data showing that sortases SAG0647 and SAG0648 play a semi-redundant role in surface exposure of GBS 80 and GBS 104.

[0129] FIG. 10 presents Western Blots of the in-frame deletion mutants probed with anti-GBS80 and anti-GBS 104 antisera.

[0130] FIG. 11: Electron micrograph of surface exposed pili structures in Streptococcus agalactiae containing GBS 80.

[0131] FIG. 12: PHD predicted secondary structure of GBS 067.

[0132] FIGS. 13, 14 and 15: Electron micrograph of surface exposed pili structures of strain isolate COH1 of Streptococcus agalactiae containing a plasmid insert encoding GBS 80.

[0133] FIGS. 16 and 17: Electron micrograph of surface exposed pili structure of wild type strain isolate COH1 of Streptococcus agalactiae.

[0134] FIG. 18: Alignment of polynucleotide sequences of AI-1 from serotype V, strain isolates 2603 and CJB111; serotype II, strain isolate 18RS21; serotype III, strain isolates COH1 and NEM316; and serotype 1a, strain isolate A909.

[0135] FIG. 19: Alignment of polynucleotide sequences of AI-2 from serotype V, strain isolates 2603 and CJB111; serotype U, strain isolate 18RS21; serotype 1b, strain isolate H36B; and serotype 1a, strain isolate 515.

[0136] FIG. 20: Alignment of polynucleotide sequences of AI-2 from serotype V, strain isolate 2603 and serotype III, strain isolate NEM316.

[0137] FIG. 21: Alignment of polynucleotide sequences of AI-2 from serotype III, strain isolate COH1 and serotype Ia, strain isolate A909.

[0138] FIG. 22: Alignment of amino acid sequences of AI-1 surface protein GBS 80 from serotype V, strain isolates 2603 and CJB111; serotype 1a, strain isolate A909; serotype III, strain isolates COH1 and NEM316.

[0139] FIG. 23: Alignment of amino acid sequences of AI-1 surface protein GBS 104 from serotype V, strain isolates 2603 and CJB111; serotype III, strain isolates COH1 and NEM316; and serotype II, strain isolate 18RS21.

[0140] FIG. 24: Alignment of amino acid sequences of AI-2 surface protein GBS 067 from serotype V, strain isolates 2603 and CJB111; serotype 1a, strain isolate 515; serotype II, strain isolate 18RS21; serotype Ib, strain isolate H36B; and serotype III, strain isolate NEM316.

[0141] FIG. 25: Illustrates that GBS closely associates with tight junctions and cross the monolayer of ME180 cervical epithelial cells by a paracellular route.

[0142] FIG. 26: Illustrates GBS infection of ME180 cells.

[0143] FIG. 27: Illustrates that GBS 80 recombinant protein does not bind to epithelial cells.

[0144] FIG. 28: Illustrates that deletion of GBS 80 does not effect the capacity of GBS strain 2603 V/R to adhere and invade ME180 cervical epithelial cells.

[0145] FIG. 29: Illustrates binding of recombinant GBS 104 protein to epithelial cells.

[0146] FIG. 30: Illustrates that deletion of GBS 104 in the GBS strain COH1, reduces the capacity of GBS to adhere to ME180 cervical epithelial cells.

[0147] FIG. 31: Illustrates that GBS 80 knockout mutant strain partially loses the ability to translocate through an epithelial cell monolayer.

[0148] FIG. 32: Illustrates that deletion of GBS 104, but not GBS 80, reduces the capacity of GBS to invade J774 macrophage-like cell line.

[0149] FIG. 33: Illustrates that GBS 104 knockout mutant strain translocates through an epithelial monolayer less efficiently than the isogenic wild type.

[0150] FIG. 34: Negative stained electron micrographs of GBS serotype III, strain isolate COH1, containing a plasmid insert to over-express GBS 80.

[0151] FIG. 35: Electron micrographs of surface exposed pili structures on GBS serotype III, strain isolate COH1, containing a plasmid insert to over-express GBS 80, stained with anti-GBS 80 antibodies (visualized with 10 nm gold particles).

[0152] FIG. 36: Electron micrographs of surface exposed pili structures on GBS serotype III, strain isolate COH1, containing a plasmid insert to over-express GBS 80, stained with anti-GBS 80 antibodies (visualized with 10 nm gold particles).

[0153] FIG. 37: Electron micrographs of surface exposed pili structures on GBS serotype III, strain isolate COH1, containing a plasmid insert to over-express GBS 80, stained with anti-GBS 80 antibodies (visualized with 20 nm gold particles).

[0154] FIG. 38: Electron micrographs of surface exposed pili structures on GBS serotype III, strain isolate COH1, containing a plasmid insert to over-express GBS 80, stained with anti-GBS 104 antibodies or preimmune sera (visualized with 10 nm gold particles).

[0155] FIG. 39: Electron micrographs of surface exposed pili structures on GBS serotype III, strain isolate COH1, containing a plasmid insert to over-express GBS 80, stained with anti-GBS 80 antibodies (visualized with 20 nm gold particles) and anti-GBS 104 antibodies (visualized with 10 nm gold particles).

[0156] FIG. 40: Electron micrographs of surface exposed pili structures on GBS serotype III, strain isolate COH1, containing a plasmid insert to over-express GBS 80, stained with anti-GBS 80 antibodies (visualized with 20 nm gold particles) and anti-GBS 104 antibodies (visualized with 10 nm gold particles). FIG. 41: Illustrates that GBS 80 is necessary for polymer formation and GBS 104 and sortase SAG0648 are necessary for efficient assembly of pili.

[0157] FIG. 42: Illustrates that GBS 67 is part of a second pilus and that GBS 80 is polymerized in strain 515.

[0158] FIG. 43: Illustrates that two macro-molecules are visible in Coh1, one of which is the GBS 80 pilin.

[0159] FIG. 44: Illustrates pilin assembly.

[0160] FIG. 45: Illustrates that GBS 52 is a minor component of the GBS pilus.

[0161] FIG. 46: Illustrates that the pilus is found in the supernatant of a bacterial culture.

[0162] FIG. 47: Illustrates that the pilus is found in the supernatant of bacterial cultures in all phases.

[0163] FIG. 48: Illustrates that in Coh1, only the GBS 80 protein and one sortase (sag0647 or sag0648) is required for polymerization.

[0164] FIG. 49: IEM image of GBS 80 staining of a GBS serotype VIII strain JM9030013 that express pili.

[0165] FIG. 50: IEM image of GBS 104 staining of a GBS serotype VIII strain JM9030013 that express pili.

[0166] FIG. 51A: Schematic depiction of open reading frames comprising a GAS AI-2 serotype M1 isolate, GAS AI-3 serotype M3, M5, M18, and M49 isolates, a GAS AI-4 serotype M12 isolate, and an GAS AI-1 serotype M6 isolate.

[0167] FIG. 51B: Amino acid alignment of SrtC1-type sortase of a GAS AI-2 serotype M1 isolate, SrtC2-type sortases of serotype M3, M5, M18, and M49 isolates, and a SrtC2-type sortase of a GAS AI-4 serotype M12 isolate.

[0168] FIG. 52: Amino acid alignment of the capsular polysaccharide adhesion proteins of GAS AI-4 serotype M12 (A735), GAS AI-3 serotype M5 (Manfredo), S. pyogenes strain MGAS315 serotype M3, S. pyogenes strain SSI-1 serotype M3, S. pyogenes strain MGAS8232 serotype M3, and GAS AI-2 serotype M1.

[0169] FIG. 53: Amino acid alignment of F-like fibronectin-binding proteins of GAS AI-4 serotype M12 (A735) and S. pyogenes strain MGAS10394 serotype M6.

[0170] FIG. 54: Amino acid alignment of F2-like fibronectin-binding proteins of GAS AI-4 serotype M12 (A735), S. pyogenes strain MGAS8232 serotype M3, GAS AI-3 strain M5 (Manfredo), S. pyogenes strain SSI serotype M3, and S. pyogenes strain MGAS315 serotype M3.

[0171] FIG. 55: Amino acid alignment of fimbrial proteins of GAS AI-4 serotype M12 (A735), GAS AI-3 serotype M5 (Manfredo), S. pyogenes strain MGAS315 serotype M3, S. pyogenes strain SSI serotype M3, S. pyogenes strain MGAS8232 serotype M3, and S. pyogenes M1 GAS serotype M1.

[0172] FIG. 56: Amino acid alignment of hypothetical proteins of GAS AI-4 serotype M12 (A735), S. pyogenes strain MGAS315 serotype M3, S. pyogenes strain SSI-1 serotype M3, GAS AI-3 serotype M5 (Manfredo), and S. pyogenes strain MGAS8232 serotype M3.

[0173] FIG. 57: Results of FASTA homology search for amino acid sequences that align with the collagen adhesion protein of GAS AI-1 serotype M6 (MGAS10394).

[0174] FIG. 58: Results of FASTA homology search for amino acid sequences that align with the fimbrial structural subunit of GAS AI-1 serotype M6 (MGAS10394).

[0175] FIG. 59: Results of FASTA homology search for amino acid sequences that align with the hypothetical protein of GAS AI-2 serotype M1 (SF370).

[0176] FIG. 60: Specifies pilin and E box motifs present in GAS type 3 and 4 adhesin islands.

[0177] FIG. 61: Illustrates that surface expression of GBS 80 protein on GBS strains COH and JM9130013 correlates with formation of pili structures. Surface expression of GBS 80 was determined by FACS analysis using an antibody that cross-hybridizes with GBS 80. Formation of pili structures was determined by immunogold electron microscopy using gold-labelled anti-GBS 80 antibody.

[0178] FIG. 62: Illustrates that surface exposure is capsule-dependent for GBS 322 but not for GBS 80.

[0179] FIG. 63: Illustrates the amino acid sequence identity of GBS 59 proteins in GBS strains.

[0180] FIG. 64: Western blotting of whole GBS cell extracts with anti-GBS 59 antibodies.

[0181] FIG. 65: Western blotting of purified GBS 59 and whole GBS cell extracts with anti-GBS 59 antibodies.

[0182] FIG. 66: FACS analysis of GBS strains CJB111, 7357B, 515 using GBS 59 antiserum.

[0183] FIG. 67: Illustrates that anti-GBS 59 antibodies are opsonic for CJB111 GBS strain serotype V.

[0184] FIG. 68: Western blotting of GBS strain JM9130013 total extracts.

[0185] FIG. 69: Western blotting of GBS stain 515 total extracts shows that GBS 67 and GBS 150 are parts of a pilus.

[0186] FIG. 70: Western blotting of GBS strain 515 knocked out for GBS 67 expression

[0187] FIG. 71: FACS analysis of GBS strain 515 and GBS strain 515 knocked out for GBS 67 expression using GBS 67 and GBS 59 antiserum.

[0188] FIG. 72: Illustrates complementation of GBS 515 knocked out for GBS 67 expression with a construct overexpressing GBS 80.

[0189] FIG. 73: FACS analysis of GAS serotype M6 for spyM6_{—}0159 surface expression.

[0190] FIG. 74: FACS analysis of GAS serotype M6 for spyM6_{—}0160 surface expression.

[0191] FIG. 75: FACS analysis of GAS serotype M1 for GAS 15 surface expression.

[0192] FIG. 76: FACS analysis of GAS serotype M1 for GAS 16 surface expression using a first anti-GAS 16 antiserum.

[0193] FIG. 77: FACS analysis of GAS serotype M1 for GAS 18 surface expression using a first anti-GAS 18 antiserum.

[0194] FIG. 78: FACS analysis of GAS serotype M1 for GAS 18 surface expression using a second anti-GAS 18 antiserum.

[0195] FIG. 79: FACS analysis of GAS serotype M1 for GAS 16 surface expression using a second anti-GAS 16 antisera.

[0196] FIG. 80: FACS analysis of GAS serotype M3 for spyM3_{—}0098 surface expression.

[0197] FIG. 81: FACS analysis of GAS serotype M3 for spyM3_{—}0100 surface expression.

[0198] FIG. 82: FACS analysis of GAS serotype M3 for spyM3_{—}0102 surface expression.

[0199] FIG. 83: FACS analysis of GAS serotype M3 for spyM3_{—}0104 surface expression.

[0200] FIG. 84: FACS analysis of GAS serotype M3 for spyM3_{—}0106 surface expression.

[0201] FIG. 85: FACS analysis of GAS serotype M12 for 19224134 surface expression.

[0202] FIG. 86: FACS analysis of GAS serotype M12 for 19224135 surface expression.

[0203] FIG. 87: FACS analysis of GAS serotype M12 for 19224137 surface expression.

[0204] FIG. 88: FACS analysis of GAS serotype M12 for 19224141 surface expression.

[0205] FIG. 89: Western blot analysis of GAS 15 expression on GAS M1 bacteria.

[0206] FIG. 90: Western blot analysis of GAS 15 expression using GAS 15 immune sera

[0207] FIG. 91: Western blot analysis of GAS 15 expression using GAS 15 pre-immune sera.

[0208] FIG. 92: Western blot analysis of GAS 16 expression on GAS M1 bacteria

[0209] FIG. 93: Western blot analysis of GAS 16 expression using GAS 16 immune sera.

[0210] FIG. 94: Western blot analysis of GAS 16 expression using GAS 16 pre-immune sera.

[0211] FIG. 95: Western blot analysis of GAS 18 on GAS M1 bacteria.

[0212] FIG. 96: Western blot analysis of GAS 18 using GAS 18 immune sera.

[0213] FIG. 97: Western blot analysis of GAS 18 using GAS 18 pre-immune sera.

[0214] FIG. 98: Western blot analysis of M6_Spy0159 expression on GAS bacteria.

[0215] FIG. 99: Western blot analysis of 19224135 expression on M12 GAS bacteria.

[0216] FIG. 100: Western blot analysis of 19224137 expression on M12 GAS bacteria.

[0217] FIG. 101: Full length nucleotide sequence of an S. pneumoniae strain 670 AI.

[0218] FIG. 102: Western blot analysis of GAS 15, GAS 16, and GAS 18 in GAS M1 strain 2580.

[0219] FIG. 103: Western blot analysis of GAS 15, GAS, 16, and GAS 18 in GAS M1 strain 2913.

[0220] FIG. 104: Western blot analysis of GAS 15, GAS 16, and GAS 18 in GAS M1 strain 3280.

[0221] FIG. 105: Western blot analysis of GAS 15, GAS 16, and GAS 18 in GAS M1 strain 3348.

[0222] FIG. 106: Western blot analysis of GAS 15, GAS 16, and GAS 18 in GAS M1 strain 2719.

[0223] FIG. 107: Western blot analysis of GAS 15, GAS 16, and GAS 18 in GAS M1 strain SF370.

[0224] FIG. 108: Western blot analysis of 19224135 and 19224137 in GAS M12 strain 2728.

[0225] FIG. 109: Western blot analysis of 19224139 in GAS M12 strain 2728 using antisera raised against SpyM3_{—}0102.

[0226] FIG. 110: Western blot analysis of M6_Spy0159 and M6_Spy0160 in GAS M6 strain 2724.

[0227] FIG. 111: Western blot analysis of M6_Spy 159 and M6_Spy0160 in GAS M6 strain SF370.

[0228] FIG. 112: Western blot analysis of M6_Spy160 in GAS M6 strain 2724.

[0229] FIGS. 113-115: Electron micrographs of surface exposed GAS 15 on GAS M1 strain SF370.

[0230] FIGS. 116-121: Electron micrographs of surface exposed GAS 16 on GAS M1 strain SF370.

[0231] FIGS. 122-125: Electron micrographs of surface exposed GAS 18 on GAS M1 strain SF370 detected using anti-GAS 18 antisera.

[0232] FIG. 126: IEM image of a hyperoligomer on GAS M1 strain SF370 detected using anti-GAS 18 antisera.

[0233] FIGS. 127-132: IEM images of oligomeric and hyperoligomeric structures containing M6_Spy0160 extending from the surface of GAS serotype M6 3650.

[0234] FIGS. 133A and B: Western blot analysis of L. lactis transformed to express GBS 80 with anti-GBS 80 antiserum.

[0235] FIG. 134: Western blot analyses of L. lactis transformed to express GBS AI-1 with anti-GBS 80 antiserum.

[0236] FIG. 135: Ponceau staining of same acrylamide gel as used in FIG. 134.

[0237] FIG. 136A: Western blot analysis of sonicated pellets and supernatants of cultured L. lactis transformed to express GBS AI-1 polypeptides using anti-GBS 80 antiserum.

[0238] FIG. 136B: Polyacrylamide gel electrophoresis of sonicated pellets and supernatants of cultured L. lactis transformed to express GBS AI polypeptides.

[0239] FIG. 137: Depiction of an example S. pneumoniae AI locus.

[0240] FIG. 138: Schematic of primer hybridization sites within the S. pneumoniae AI locus of FIG. 137.

[0241] FIG. 139A: The set of amplicons produced from the S. pneumoniae strain TIGR4 AI locus.

[0242] FIG. 139B: Base pair lengths of amplicons produced from FIG. 139A primers in S. pneumoniae strain TIGR4.

[0243] FIG. 140: CGH analysis of S. pneumoniae strains for the AI locus.

[0244] FIG. 141: Amine acid sequence alignment of polypeptides encoded by AI orf2 in S. pneumoniae AI-positive strains.

[0245] FIG. 142: Amino acid sequence alignment of polypeptides encoded by AI orf 3 in S. pneumoniae AI-positive strains.

[0246] FIG. 143: Amino acid sequence alignment of polypeptides encoded by AI orf 4 in S. pneumoniae AI-positive strains.

[0247] FIG. 144: Amino acid sequence alignment of polypeptides encoded by AI orf 5 in S. pneumoniae AI-positive strains.

[0248] FIG. 145: Amino acid sequence alignment of polypeptides encoded by AI orf 6 in S. pneumoniae AI-positive strains.

[0249] FIG. 146: Amino acid sequence alignment of polypeptides encoded by AI orf 7 in S. pneumoniae AI-positive strains.

[0250] FIG. 147: Amino acid sequence alignment of polypeptides encoded by AI orf 8 in S. pneumoniae AI-positive strains.

[0251] FIG. 148: Diagram comparing amino acid sequences of RrgA in S. pneumoniae strains.

[0252] FIG. 149: Amino acid sequence comparison of RrgB S. pneumoniae strains.

[0253] FIG. 150A: Sp0462 amino acid sequence.

[0254] FIG. 150B: Primers used to produce a clone encoding the Sp0462 polypeptide.

[0255] FIG. 151A: Schematic depiction of recombinant Sp0462 polypeptide.

[0256] FIG. 151B: Schematic depiction of full-length Sp0462 polypeptide.

[0257] FIG. 152A: Western blot probed with serum obtained from S. pneumoniae-infected patients for Sp0462.

[0258] FIG. 152B: Western blot probed with GBS 80 serum for Sp0462.

[0259] FIG. 153A: Sp0463 amino acid sequence.

[0260] FIG. 153B: Primers used to produce a clone encoding the Sp0463 polypeptide.

[0261] FIG. 154A: Schematic depiction of recombinant Sp0463 polypeptide.

[0262] FIG. 154B: Schematic depiction of full-length Sp0463 polypeptide.

[0263] FIG. 155: Western blot detection of recombinant Sp0463 polypeptide.

[0264] FIG. 156: Western blot detection of high molecular weight Sp0463 polymers.

[0265] FIG. 157A: Sp0464 amino acid sequence.

[0266] FIG. 157B: Primers used to produce a clone encoding the Sp0464 polypeptide.

[0267] FIG. 158A: Schematic depiction of recombinant Sp0464 polypeptide.

[0268] FIG. 158B: Schematic depiction of full-length Sp0464 polypeptide.

[0269] FIG. 159: Western blot detection of recombinant Sp0464 polypeptide.

[0270] FIG. 160: Amplification products prepared for production of Sp0462, Sp0463, and Sp0464 clones.

[0271] FIG. 161: Opsonic killing by anti-sera raised against L. lactis expressing GBS AI

[0272] FIG. 162: Schematic depicting GAS adhesin islands GAS AI-1, GAS AI-2, GAS AI-3 and GAS AI-4.

[0273] FIGS. 163 A-D: Immunoblots of cell-wall fractions of GAS strains with antisera specific for LPXTG proteins of M6_ISS3650 (A), M1_SF370 (B), M5_ISS4883 (C) and M12_{—}20010296(D).

[0274] FIGS. 163 E-H: Immunoblots of cell-wall fractions of deletion mutants M1_SF370Δ128 (E) M1_SF370Δ130 (F) M1_SF370ΔSrtC1 (G) and the M1_{—}128 deletion strain complemented with plasmid pAM::128 which contains the M1_{—}128 gene (H) with antisera specific for the pilin components of M1_SF370.

[0275] FIGS. 163 I-N: Immunogold labelling and transmission electron microscopy of: T6 (I) and Cpa (J) in M6_ISS3650; M1_{—}128 in M1_SF370 (K) and deletion strain M1_SF370Δ128 (N); M5_orf80 in M5_ISS4883 (L); M12_EftLSL.A in M12_{—}20010296 (M). The strains used are indicated below the panels. Bars=200 nm.

[0276] FIG. 164: Schematic representation of the FCT region from 7 GAS strains

[0277] FIGS. 165 A-H: Flow cytometry of GAS bacteria treated or not with trypsin and stained with sera specific for the major pilus component. Preimmune staining; black lines, untreated bacteria; green lines and trypsin treated bacteria; blue lines. M6_ISS3650 stained with sera which recognize the M6 protein (A) or anti-M6_T6 (B), M1_SF370 stained with anti-M1 (C) or anti-M1_{—}128 (D), M5_ISS4883 stained with anti-PrtF (E) or anti-M5_orf80 (F) and M12_{—}20010296 with anti-M12 (G) or anti-EftLSL.A (H)

[0278] FIGS. 166 A-C: Immunoblots of recombinant pilin components with polyvalent Lancefield T-typing sera. The recombinant proteins are shown above the blot and the sera pool used is shown below the blot.

[0279] FIGS. 166 D-G: Immunoblots of pilin proteins with monovalent T-typing sera. The recombinant proteins are shown below the blot and the sera used above the blot.

[0280] FIGS. 166 H and I Flow cytometry analysis of strain M1_SF370 (H) and the deletion strain M1_SF370Δ128 (1) with T-typing antisera pool T.

[0281] FIG. 167: Chart describing the number and type of sortase sequences identified within GAS AIs.

[0282] FIG. 168 A: Immunogold-electronmicroscopy of L. lactis lacking an expression construct for GBS AI-1 using anti-GBS 80 antibodies.

[0283] FIGS. 168 B and C: Immunogold-electronmicroscopy detects GBS 80 in oligomeric (pilus) structures on surface of L. lactis transformed to express GBS AI-1

[0284] FIG. 169: FACS analysis detects expression of GBS 80 and GBS 104 on the surface of L. lactis transformed to express GBS AI-1.

[0285] FIG. 170: Phase contrast microscopy and immuno-electronmicroscopy shows that expression of GBS AI-1 in L. lactis induces L. lactis aggregation.

[0286] FIG. 171: Purification of GBS pili from L. lactis transformed to express GBS AI-1.

[symbol]

islands and portions of the adhesin islands inserted in the pAM401 construct for expression in L. lactis.

[0287] FIG. 173 A-C: Western blot analysis showing assembly of GAS pili in L. lactis expressing GAS AI-2 (M1) (A), GAS AI-4 (M12) (B), and GAS AI-1 (M6) (C).

[0288] FIG. 174: FACS analysis of GAS serotype M6 for M6_Spy0157 surface expression.

[0289] FIG. 175: FACS analysis of GAS serotype M12 for 19224139 surface expression.

[0290] FIG. 176 A-E: Immunogold electron microscopy using antibodies against M6_Spy0160 detects pili on the surface of M6 strain 2724.

[0291] FIG. 176 F: Immunogold electron microscopy using antibodies against M6_Spy0159 detects M6_Spy0159 surface expression on M6 strain 2724.

[0292] FIG. 177 A-C: Western blot analysis of M1 strain SF370 GAS bacteria individually deleted for M1_{—}130, SrtC1, or M1_{—}128 using anti-M1_{—}130 serum (A), anti-M1_{—}128 serum (B), and anti-M1_{—}126 serum (C).

[0293] FIG. 178 A-C: Immunogold electron microscopy using antibodies against M1_{—}128 to detect surface expression on wildtype strain SF370 bacteria (A), M1_{—}128 deleted SF370 bacteria (B), and SrtC1 deleted SF370 bacteria (C).

[0294] FIG. 179 A-C: FACS analysis to detect expression of M1_{—}126 (A), M1_{—}128 (B), and M1_{—}30 (C) on the surface of wildtype SF370 GAS bacteria.

[0295] FIG. 179 D-F: FACS analysis to detect expression of M1_{—}126 (D), M1_{—}128 (E), and M1_{—}130 (F) on the surface of M1_{—}128 deleted SF370 GAS bacteria.

[0296] FIG. 179 G-I: FACS analysis to detect expression of M1_{—}126 (G), M1_{—}128 (H), and M1_{—}130 (I) on the surface of SrtC1 deleted SF370 GAS bacteria.

[0297] FIGS. 180 A and B: FACS analysis of wildtype (A) and LepA deletion mutant (B) strains of SF370 bacteria for M1 surface expression.

[0298] FIG. 181: Western blot analysis detects high molecular weight polymers in S. pneumoniae TIGR4 using anti-RrgB antisera.

[0299] FIG. 182: Detection of high molecular weight polymers in S. pneumoniae rlrA positive strains.

[0300] FIG. 183: Detection of high molecular weight polymers in S. pneumoniae TIGR4 by silver staining and Western blot analysis using anti-RrgB antisera.

[0301] FIG. 184: Deletion of S. pneumoniae TIGR4 adhesin island sequences interferes with the ability of S. pneumoniae to adhere to A549 alveolar cells.

[0302] FIG. 185: Negative staining of S. pneumoniae strain TIGR4 showing abundant pili on the bacterial surface.

[0303] FIG. 186: Negative staining of strain TIGR4 deleted for rrgA-srtD adhesin island sequences showing no pili on the bacterial surface

[symbol]

bacterial surface.

[0304] FIG. 188: Negative staining of the negative control TIGR4 mgrA mutant deleted for adhesin island sequences rrgA-srtD showing no pili on the bacterial surface.

[0305] FIG. 189: Immuno-gold labelling of S. pneumoniae strain TIGR4 grown on blood agar solid medium using α-RrgB (5 nm) and α-RrgC (10 nm). Bar represents 200 nm.

[0306] FIGS. 190 A and B: Detection of expression and purification of S. pneumoniae RrgA protein by SDS-PAGE (A) and Western blot analysis (B).

[0307] FIG. 191: Detection of RrgB by antibodies produced in mice.

[0308] FIG. 192: Detection of RrgC by antibodies produced in mice.

[0309] FIG. 193: Purification of S. pneumoniae TIGR 4 pili by a cultivation and digestion method and detection of the purified TIGR4 pili.

[0310] FIG. 194: Purification of S. pneumoniae TIGR 4 pili by a sucrose gradient centrifugation method and detection of the purified TIGR4 pili.

[0311] FIG. 195: Purification of S. pneumoniae TIGR 4 pili by a gel filtration method and detection of the purified TIGR4 pili.

[0312] FIG. 196: Alignment of full length S. pneumoniae adhesin island sequences from ten S. pneumoniae strains.

[0313] FIG. 197 A: Schematic of GBS AI-1 coding sequences.

[0314] FIG. 197 B: Nucleotide sequence of intergenic region between AraC and GBS 80 (SEQ ID NO: 273.

[0315] FIG. 197 C: FACS analysis results for GBS 80 expression in GBS strains having different length polyA tracts in the intergenic region between AraC and GBS 80.

[0316] FIG. 198: Table comparing the percent identity of surface proteins encoded by a serotype M6 (harbouring a GAS AI-1) adhesin island relative to other GAS serotypes harbouring an adhesin island.

[0317] FIG. 199: Table comparing the percent identity of surface proteins encoded by a serotype M1 (harbouring a GAS AI-2) adhesin island relative to other GAS serotypes harbouring an adhesin island.

[0318] FIG. 200: Table comparing the percent identity of surface proteins encoded by serotypes M3, M18, M5, and M49 (harbouring GAS AI-3) adhesin islands relative to other GAS serotypes harbouring an adhesin island.

[0319] FIG. 201: Table comparing the percent identity of surface proteins encoded by a serotype M12 (harbouring a GAS AI-1) adhesin island—relative to other GAS serotypes harbouring an adhesin island.

[0320] FIG. 202: GBS 80 recombinant protein does not bind to epithelial cells.

[0321] FIG. 203: Deletion of GBS 80 protein does not affect the ability of GBS to adhere and invade ME180 cervical epithelial cells.

[symbol]

[0322] FIG. 205: Deletion of GBS 104 protein, but not GBS 80, reduces the capacity of GBS to invade J774 macrophage-like cells

[0323] FIG. 206: GBS 104 knockout mutant strains of bacteria translocate through an epithelial monolayer less efficiently that the isogenic wild type strain.

[0324] FIG. 207: GBS 80 knockout mutant strains of bacteria partially lose the ability to translocate through an epithelial monolayer.

[0325] FIG. 208: GBS adherence to HUVEC endothelial cells.

[0326] FIG. 209: Strain growth rate of wildtype, GBS 80-deleted, or GBS 104 deleted COH1 GBS.

[0327] FIG. 210: Binding of recombinant GBS 104 protein to epithelial cells by FACS analysis.

[0328] FIG. 211: Deletion of GBS 104 protein in the GBS strain COH1 reduces the ability of GBS to adhere to ME180 cervical epithelial cells.

[0329] FIG. 212: COH1 strain GBS overexpressing GBS 80 protein has an impaired capacity to translocate through an epithelial monolayer.

[0330] FIG. 213: Scanning electron microscopy shows that overexpression of GBS 80 protein on COH1 strain GBS enhances the capacity of the COH1 bacteria to form microcolonies on epithelial cells.

[0331] FIG. 214: Confocal imaging shows that overexpression of GBS 80 proteins on COH1 strain GBS enhances the capacity of the COH1 bacteria to form microcolonies on epithelial cells.

[0332] FIG. 215: Detection of GBS 59 on the surface of GBS strain 515 by immuno-electron microscopy.

[0333] FIG. 216: Detection of GBS 67 on the surface of GBS strain 515 by immuno-electron microscopy.

[0334] FIG. 217: GBS 67 binds to fibronectin.

[0335] FIG. 218: Western blot analysis shows that deletion of both GBS AI-2 sortase genes abolishes assembly of the pilus.

[0336] FIG. 219: FACS analysis shows that deletion of both GBS AI-2 sortase genes abolishes assembly of the pilus.

[0337] FIG. 220 A-C: Western blot analysis shows that GBS 59, GBS 67, and GBS 150 form high molecular weight complexes.

[0338] FIG. 221 A-C: Western blot analysis shows that GBS 59 is required for polymer formation of GBS 67 and GBS 150.

[0339] FIG. 222: FACS analysis shows that GBS 59 is required for surface exposure of GBS 67.

[0340] FIG. 223: Summary Western blots for detection of GBS 59, GBS 67, or GBS 150 in GBS 515 and GBS 515 mutant strain.

[0341] FIG. 224: Description of GBS 59 allelic variants.

[symbol]

### GBS 59.

[0342] FIGS. 226 A and B: Results of FACS analysis for surface expression of GBS 59 using antibodies specific for different GBS 59 isoforms.

[0343] FIGS. 227 A and B: Results of FACS analysis for surface expression of GBS 80, GBS 104, GBS 322, GBS 67, and GBS 59 on 41 various strains of GBS bacteria.

[0344] FIG. 228: Results of FACS analysis for surface expression of GBS 80, GBS 104, GBS 322, GBS 67, and GBS 59 on 41 strains of GBS bacteria obtained from the CDC.

[0345] FIG. 229: Expected immunogenicity coverage of different combinations of GBS 80, GBS 104, GBS 322, GBS 67, and GBS 59 across strains of GBS bacteria.

[0346] FIG. 230: GBS 59 opsonophagocytic activity is comparable to that of a mixture of GBS 80, GBS 104, GBS 322 and GBS 67.

[0347] FIG. 231 A-C: Schematic presentation of example hybrid GBS AIs.

[0348] FIG. 232: Schematic presentation of an example hybrid GBS AI.

[0349] FIGS. 233 A and B: Western blot and FACS analysis detect expression of GBS 80 and GBS 67 on the surface of L. lactis transformed with a hybrid GBS AI.

[0350] FIG. 234 A-E Hybrid GBS AI cloning strategy.

[0351] FIG. 235: High magnification of S. pneumoniae strain TIGR4 pili double labeled with α-RrgB (5 nm) and α-RrgC (10 nm). Bar represents 100 nm.

[0352] FIG. 236: Immuno-gold labeling of the S. pneumoniae TIGR4 rrgA-srtD deletion mutant with no visible pili on the surface detectable by α-RrgB- and α-RrgC. Bar represents 200 nm.

[0353] FIG. 237: Variability in GBS 67 amino acid sequences between strains 2603 and H36B.

[0354] FIG. 238: Strain variability in GBS 67 amino acid sequences of allele I (2603).

[0355] FIG. 239: Strain variability in GBS 67 amino acid sequence of allele II (H36B).

### BRIEF DESCRIPTION OF THE TABLES

[0356] TABLE 1: Active Maternal Immunization Assay for fragments of GBS 80

[0357] TABLE 2: Passive Maternal Immunization Assay for fragments of GBS 80

[0358] TABLE 3: Lethal dose 50% of AI-1 mutants from GBS strain isolate 2603.

[0359] TABLE 4: GAS AI-1 sequences from M6 isolate (MGAS10394).

[0360] TABLE 5: GAS AI-2 sequences from M1 isolate (SF370).

[0361] TABLE 6: GAS AI-3 sequences from M3 isolate (MGAS315).

[0362] TABLE 7: GAS AI-3 sequences from M3 isolate (SSI-1).

[0363] TABLE 8: GAS AI-3 sequences from M18 isolate (MGAS8232).

[0364] TABLE 9: S. pneumoniae AI sequences from TIGR4 sequence.

[0365] TABLE 10: GAS AI-3 sequences from M5 isolate (Manfredo).

[symbol]

[0366] TABLE 12: Conservation of GBS 80 and GBS 104 amino acid sequences.

[0367] TABLE 13: Conservation of GBS 322 and GBS 276 amino acid sequences.

[0368] TABLE 14: Active maternal immunization assay for a combination of fragments from GBS 322, GBS 80, GBS 104, and GBS 67.

[0369] TABLE 15: Antigen surface exposure of GBS 80, GBS 322, GBS 104, and GBS 67.

[0370] TABLE 16: Active maternal immunization assay for each of GBS 80 and GBS 322 antigens.

[0371] TABLE 17: Active maternal immunization assay for GBS 59.

[0372] TABLE 18: Summary of FACS values for surface expression of spyM6_{—}0159.

[0373] TABLE 19: Summary of FACS values for surface expression of spyM6_{—}0160.

[0374] TABLE 20: Summary of FACS values for surface expression of GAS 15.

[0375] TABLE 21: Summary of FACS values for surface expression of GAS 16.

[0376] TABLE 22: Summary of FACS values for surface expression of GAS 16 using a second antisera.

[0377] TABLE 23: Summary of FACS values for surface expression of GAS 18.

[0378] TABLE 24: Summary of FACS values for surface expression of GAS 18 using a second antisera.

[0379] TABLE 25: Summary of FACS values for surface expression of SpyM3_{—}0098.

[0380] TABLE 26: Summary of FACS values for surface expression of SpyM3_{—}0100.

[0381] TABLE 27: Summary of FACS values for surface expression of SpyM3_{—}0102 in M3 serotypes.

[0382] TABLE 28: Summary of FACS values for surface expression of SpyM3_{—}0102 in M6 serotypes.

[0383] TABLE 29: Summary of FACS values for surface expression of SpyM3_{—}0104 in M3 serotypes.

[0384] TABLE 30: Summary of FACS values for surface expression of SpyM3_{—}0104 in an M12 serotype.

[0385] TABLE 31: Summary of FACS values for surface expression of SPs_{—}0106 in M3 serotypes.

[0386] TABLE 32: Summary of FACS values for surface expression of SPs_{—}0106 in an M12 serotype.

[0387] TABLE 33: Summary of FACS values for surface expression of 19224134 in an M12 serotype.

[0388] TABLE 34: Summary of FACS values for surface expression of 19224134 in M6 serotypes.

[0389] TABLE 35: Summary of FACS values for surface expression of 19224135 in an M12 serotype.

[0390] TABLE 36: Summary of FACS values for surface expression of 19224137 in an M12 serotype.

[symbol]

serotype.

[0391] TABLE 38: S. pneumoniae strain 670 AI sequences.

[0392] TABLE 39: Percent identity comparison of S. pneumoniae strains AI sequences.

[0393] TABLE 40: FACS analysis of L. lactis and GBS bacteria strains expressing GBS AI-1.

[0394] TABLE 41: Sequences of primers used to amplify AI locus.

[0395] TABLE 42: Conservation of amino acid sequences encoded by the S. pneumoniae AI locus.

[0396] TABLE 43: Protection of Mice Immunized with L. lactis expressing GBS AI-1.

[0397] TABLE 44: GAS AI-3 sequences from M49 isolate (591).

[0398] TABLE 45: Comparison of Sequences Between the Four GAS AIs.

[0399] TABLE 46: Antibody Responses against GBS 80 in Serum of Mice Immunized with L. lactis Expressing GBS AI-1

[0400] TABLE 47: Anti-GBS 80 IgA Antibodies Detected in Mouse Tissues Following Immunization with L. lactis Expressing GBS AI-1

[0401] TABLE 48: GBS 67 Protects Mice in an Immunization Assay

[0402] TABLE 49: Exposure Levels of GBS 80, GBS 104, GBS 67, GBS 322, and GBS 59 on GBS Strains

[0403] TABLE 50: High Levels of Surface Protein Expression on GBS Serotypes

[0404] TABLE 51: Further Protection of Mice Immunized with L. lactis expressing GBS AI-1

### DETAILED DESCRIPTION OF THE INVENTION

[0405] The practice of the present invention will employ, unless otherwise indicated, conventional methods of chemistry, biochemistry, molecular biology, immunology and pharmacology, within the skill of the art. Such techniques are explained fully in the literature. See, e.g., Remington's Pharmaceutical Sciences, Mack Publishing Company, Easton, Pa, 19th Edition (1995); Methods In Enzymology (S. Colowick and N. Kaplan, eds., Academic Press, Inc.); and Handbook of Experimental Immunology, Vols. I-IV (D. M. Weir and C. C. Blackwell, eds., 1986, Blackwell Scientific Publications); Sambrook, et al., Molecular Cloning: A Laboratory Manual (2nd Edition, 1989); Handbook of Surface and Colloidal Chemistry (Birdi, K. S. ed., CRC Press, 1997); Short Protocols in Molecular Biology, 4th ed. (Ausubel et al. eds., 1999, John Wiley & Sons); Molecular Biology Techniques: An Intensive Laboratory Course, (Ream et al., eds., 1998, Academic Press); PCR (Introduction to Biotechniques Series), 2nd ed. (Newton & Graham eds., 1997, Springer Verlag); Peters and Dalrymple, Fields Virology (2d ed), Fields et al. (eds.), B. N. Raven Press, New York, N.Y.

[0406] All publications, patents and patent applications cited herein, are hereby incorporated by reference in their entireties.

[0407] As used herein, an “Adhesin Island” or “AI” refers to a series of open reading frames within a bacterial genome, such as the genome for Group A or Group B Streptococcus or other gram positive bacteria, that encodes for a collection of surface proteins and sortases. An Adhesin Island may

[symbol]

encode at least one surface protein. Alternatively, an Adhesin Island may encode for at least two surface proteins and at least one sortase. Preferably, an Adhesin Island encodes for at least three surface proteins and at least two sortases. One or more of the surface proteins may include an LPXTG motif (such as LPXTG (SEQ ID NO: 122)) or other sortase substrate motif. One or more AI surface proteins may participate in the formation of a pilus structure on the surface of the gram positive bacteria.

[0408] Adhesin Islands of the invention preferably include a divergently transcribed transcriptional regulator (i.e., the transcriptional regulator is located near or adjacent to the AI protein open reading frames, but it transcribed in the opposite direction). The transcriptional regulator may regulate the expression of the AI operon.

### GBS Adhesin Island 1

[0409] As discussed above, Applicants have identified a new adhesin island, “Adhesin Island 1”, “AI-1”, or “GBS AI-1”, within the genomes of several Group B Streptococcus serotypes and isolates. AI-1 comprises a series of approximately five open reading frames encoding for a collection of amino acid sequences comprising surface proteins and sortases (“AI-1 proteins”). Specifically, AI-1 includes open reading frames encoding for two or more (i.e., 2, 3, 4 or 5) of GBS 80, GBS 104, GBS 52, SAG0647 and SAG0648. One or more of the AI-1 open reading frame polynucleotide sequences may be replaced by a polynucleotide sequence coding for a fragment of the replaced ORF. Alternatively, one or more of the AI-1 open reading frames may be replaced by a sequence having sequence homology to the replaced ORF.

[0410] A schematic of AI-1 is presented in FIG. 1. AI-1 typically resides on an approximately 16.1 kb transposon-like element frequently inserted into the open reading frame for trmA. One or more of the AI-1 surface protein sequences typically include an LPXTG motif (such as LPXTG (SEQ ID NO: 122)) motif or other sortase substrate motif. The AI surface proteins of the invention may affect the ability of the GBS bacteria to adhere to and invade epithelial cells. AI surface proteins may also affect the ability of GBS to translocate through an epithelial cell layer. Preferably, one or more AI surface proteins are capable of binding to or otherwise associating with an epithelial cell surface. AI surface proteins may also be able to bind to or associate with fibrinogen, fibronectin, or collagen.

[0411] The AI-1 sortase proteins are predicted to be involved in the secretion and anchoring of the LPXTG containing surface proteins. AI-1 may encode for at least one surface protein. Alternatively, AI-1 may encode for at least two surface exposed proteins and at least one sortase. Preferably, AI-1 encodes for at least three surface exposed proteins and at least two sortases. The AI-1 protein preferably includes GBS 80 or a fragment thereof or a sequence having sequence identity thereto.

[0412] As used herein, an LPXTG motif represents an amino acid sequence comprising at least five amino acid residues. Preferably, the motif includes a leucine (L) in the first amino acid position, a proline (P) in the second amino acid position, a threonine (T) in the fourth amino acid position and a glycine (G) in the fifth amino acid position. The third position, represented by X, may be occupied by

[symbol]

Glutamine (Q) or Alanine (A). Preferably, the X position is occupied by lysine (K). In some embodiments, one of the assigned LPXTG amino acid positions is replaced with another amino acid. Preferably, such replacements comprise conservative amino acid replacements, meaning that the replaced amino acid residue has similar physiological properties to the removed amino acid residue. Genetically encoded amino acids may be divided into four families based on physiological properties: (1) acidic (aspartate and glutamate), (2) basic (lysine, arginine, histidine), (3) non-polar (alanine, valine, leucine, isoleucine, proline, phenylalanine, methionine, tryptophane) and (4) uncharged polar (glycine, asparagines, glutamine, cysteine, serine, threonine, and tyrosine). Phenylalanine, tryptophan and tyrosine are sometimes classified jointly as aromatic amino acids. For example, it is reasonably predictable that an isolated replacement of a leucine with an isoleucine or valine, an aspartate with a glutamate, a threonine with a serine, or a similar conservative replacement of an amino acid with a structurally related amino acid will not have a major effect on the biological activity.

[0413] The first amino acid position of the LPXTG motif may be replaced with another amino acid residue. Preferably, the first amino acid residue (leucine) is replaced with an alanine (A), valine (V), isoleucine (I), proline (P), phenylalanine (F), methionine (M), glutamic acid (E), glutamine (Q), or tryptophan (Y) residue. In one preferred embodiment, the first amino acid residue is replaced with an isoleucine (I).

[0414] The second amino acid residue of the LPXTG motif may be replaced with another amino acid residue. Preferably, the second amino acid residue praline (P) is replaced with a valine (V) residue.

[0415] The fourth amino acid residue of the LPXTG motif may be replaced with another amino acid residue. Preferably, the fourth amino acid residue (threonine) is replaced with a serine (S) or an alanine (A).

[0416] In general, an LPXTG motif may be represented by the amino acid sequence XXXXG, in which X at amino acid position 1 is an L, a V, an E, an I, an F, or a Q; X at amino acid position 2 is a P if X at amino acid position 1 is an L, an L or an F; X at amino acid position 2 is a V if X at amino acid position 1 is a E or a Q; X at amino acid position 2 is a V or a P if X at amino acid position 1 is a V; X at amino acid position 3 is any amino acid residue; X at amino acid position 4 is a T if X at amino acid position 1 is a V, E, I, F, or Q; and X at amino acid position 4 is a T, S, or A if X at amino acid position 1 is an L.

[0417] Generally, the LPXTG motif of a GBS AI protein may be represented by the amino acid sequence XPXTG, in which X at amino acid position 1 is L, I, or F, and X at amino acid position 3 is any amino acid residue. Specific examples of LPXTG motifs in GBS AI proteins may include LPXTG (SEQ ID NO: 122) or IPXTG (SEQ ID NO: 133).

[0418] As discussed further below, the threonine in the fourth amino acid position of the LPXTG motif may be involved in the formation of a bond between the LPXTG containing protein and a cell wall precursor. Accordingly, in preferred LPXTG motifs, the threonine in the fourth amino acid

[symbol]

amino acid is preferably a conservative amino acid replacement, such as serine.

[0419] Instead of an LPXTG motif, the AI surface proteins of the invention may contain alternative sortase substrate motifs such as NPQTN (SEQ ID NO: 142), NPKTN (SEQ ID NO: 168), NPQTG (SEQ ID NO: 169), NPKTG (SEQ ID NO: 170), XPXTGG (SEQ ID NO: 143), LPXTAX (SEQ ID NO: 144), or LAXTGX (SEQ ID NO: 145). (Similar conservative amino acid substitutions can also be made to these membrane motifs).

[0420] The AI surface proteins may be covalently attached to the bacterial cell wall by membrane-associated transpeptidases, such as an AI sortase. The sortase may function to cleave the surface protein, preferably between the threonine and glycine residues of an LPXTG motif. The sortase may then assist in the formation of an amide link between the threonine carboxyl group and a cell wall precursor such as lipid II. The precursor can then be incorporated into the peptidoglycan via the transglycoslylation and transpeptidation reactions of bacterial wall synthesis. See Comfort et al., Infection & Immunity (2004) 72(5): 2710-2722.

[0421] The AI surface proteins may be polymerized into pili by sortase-catalysed transpeptidation. (See FIG. 44.) Cleavage of AI surface proteins by sortase between the threonine and glycine residues of an LPXTG motif yields a thioester-linked acyl intermediate of sortase. Many AI surface proteins include a pilin motif amino acid sequence which interacts with the sortase and LPXTG amino acid sequence. The first lysine residue in a pilin motif can serve as an amino group acceptor of the cleaved LPXTG motif and thereby provide a covalent linkage between AI subunits to form pili. For example, the pilin motif can make a nucleophilic attack on the acyl enzyme providing a covalent linkage between AI subunits to form pili and regenerate the sortase enzyme. Examples of pilin motifs may include ((YPKN(X₁₀)K; SEQ ID NO: 146), (YPKN(X₉)K, SEQ ID NO: 147), (YPK(X₇)K; SEQ ID NO: 148), (YPK(X₁₁)K; SEQ ID NO: 149), or (PKN(X₉)K; SEQ ID NO: 150)). Preferably, the AI surface proteins of the invention include a pilin motif amino acid sequence.

[0422] Typically, AI surface proteins of the invention will contain an N-terminal leader or secretion signal to facilitate translocation of the surface protein across the bacterial membrane.

[0423] Group B Streptococci are known to colonize the urinary tract, the lower gastrointestinal tract and the upper respiratory tract in humans. Electron micrograph images of GBS infection of a cervical epithelial cell line (ME180) are presented in FIG. 25. As shown in these images, the bacteria closely associate with tight junctions between the cells and appear to cross the monolayer by a paracellular route. Similar paracellular invasion of ME180 cells is also shown in the contrast images in FIG. 26. The AI surface proteins of the invention may effect the ability of the GBS bacteria to adhere to and invade epithelial cells. AI surface proteins may also affect the ability of GBS to translocate through an epithelial cell layer. Preferably, one or more AI surface proteins are capable of binding to or otherwise associating with an epithelial cell surface.

[0424] Applicants have discovered that AI-1 surface protein GBS 104 can bind epithelial cells such as ME180 human cervical cells, A549 human lung cells and Caco2 human intestinal cells (See

[symbol]

of GBS to adhere to ME180 cervical epithelial cells. (See FIGS. 30 and 211). Deletion of GBS 104 also reduces the capacity of GBS to invade J774 macrophage-like cells. (See FIGS. 32 and 205). Deletion of GBS 104 also causes GBS to translocate through epithelial monolayers less efficiently. See FIG. 206. GBS 104 protein therefore appears to bind to ME180 epithelial cells and to have a role in adhesion to epithelial cells and macrophage cell lines.

[0425] Similar to the GBS bacteria that are deletion mutants for GBS 104, GBS 80 knockout mutant strains also partially lose the ability to translocate through an epithelial monolayer. See FIG. 207. Deletion of either GBS 80 or GBS 104 in COH1 cells diminishes adherence to HUVEC endothelial cells. See FIG. 208. Deletion of GBS 80 or GBS 104 in COH1 does not, however, affect growth of COH1 either with ME1180 cells or in incubation medium (IM). See FIG. 209. Both GBS 80 and GBS 104, therefore, appear to be involved in translocation of GBS through epithelial cells.

[0426] GBS 80 does not appear to bind to epithelial cells. Incubation of epithelial cells in the presence of GBS 80 protein followed by FACS analysis using an anti-GBS 80 polyclonal antibody did not detect GBS 80 binding to the epithelial cells. See FIG. 202. Furthermore, deletion of GBS 80 protein does not affect the ability of GBS to adhere and invade ME180 cervical epithelial cells. See FIG. 203

[0427] Preferably, one or more of the surface proteins may bind to one or more extracellular matrix (ECM) binding proteins, such as fibrinogen, fibronectin, or collagen. As shown in FIGS. 5 and 204, and Example 1, GBS 80, one of the AI-1 surface proteins, can bind to the extracellular matrix binding proteins fibronectin and fibrinogen. While GBS 80 protein apparently does not bind to certain epithelial cells or affect the capacity of a GBS bacteria to adhere to or invade cervical epithelial cells (See FIGS. 27 and 28), removal of GBS 80 from a wild type strain decreases the ability of that strain to translocate through an epithelial cell layer (see FIG. 31).

[0428] GBS 80 may also be involved in formation of biofilms. COH1 bacteria overexpressing GBS 80 protein have an impaired ability to translocate through an epithelial monolayer. See FIG. 212. These COH1 bacteria overexpressing GBS 80 form microcolonies on epithelial cells. See FIGS. 213 and 214. These microcolonies may be the initiation of biofilm development.

[0429] AI Surface proteins may also demonstrate functional homology to previously identified adhesion proteins or extracellular matrix (ECM) binding proteins. For example, GBS 80, a surface protein in AI-1, exhibits some functional homology to FimA, a major fimbrial subunit of a Gram positive bacteria A. naeslundii. FimA is thought to be involved in binding salivary proteins and may be a component in a fimbrae on the surface of A. naeslundii. See Yeung et al. (1997) Infection & Immunity 65:2629-2639; Yeunge et al. (1998) J. Bacteriol 66:1482-1491; Yeung et al. (1988) J. Bacteriol 170:3803-3809; and Li et al. (2001) Infection & Immunity 69:7224-7233.

[0430] A similar functional homology has also been identified between GBS 80 and proteins involved in pili formation in the Gram positive bacteria Corynebacterium diphtheriae (SpaA, SpaD, and SpaH). See, Ton-That et al. (2003) Molecular Microbiology 50(4):1429-1438 and Ton-That et al.

[symbol]

of WxxxVxVYPK (SEQ ID NO: 151; where x indicates a varying amino acid residue). The lysine (K) residue is particularly conserved in the C. diphtheriae pilus proteins and is thought to be involved in sortase catalyzed oligomerization of the subunits involved in the C. diphtheriae pilus structure. (The C. diphtheriae pilin subunit SpaA is thought to occur by sortase-catalyzed amide bond cross-linking of adjacent pilin subunits. As the thioester-linked acyl intermediate of sortase requires nucleophilic attack for release, the conserved lysine within the SpaA pilin motif might function as an amino group acceptor of cleaved sorting signals, thereby providing for covalent linkages of the C. diphtheria pilin subunits. See FIG. 6(d) of Ton-That et al., Molecular Microbiology (2003) 50(4):1429-1438.)

[0431] In addition, an “E box” comprising a conserved glutamic acid residue has also been identified in the C. diphtheria pilin associated proteins as important in C. diphtheria pilin assembly. The E box motif generally comprises YxLxETxAPxGY (SEQ ID NO: 152; where x indicates a varying amino acid residue). In particular, the conserved glutamic acid residue within the E box is thought necessary for C. diphtheria pilus formation.

[0432] Preferably, the AI-1 polypeptides of the immunogenic compositions comprise an E box motif. Some examples of E box motifs in the AI-1 polypeptides may include the amino acid sequences YxLxExxxxxGY (SEQ ID NO: 153), YxLxExxPxGY (SEQ ID NO: 154), or YxLxETxAPxGY (SEQ ID NO: 152). Specifically, the E box motif of the polypeptides may comprise the amino acid sequences YKLKETKAPEGY (SEQ ID NO: 155), YVLKEIETQSGY (SEQ ID NO: 156), or YKLYEISSPDGY (SEQ ID NO: 157).

[0433] As discussed in more detail below, a pilin motif containing a conserved lysine residue and an E box motif containing a conserved glutamic acid residue have both been identified in GBS 80.

[0434] While previous publications have speculated that pilus-like structures might be formed on the surface of streptococci, (see, e.g., Ton-That et al., Molecular Microbiology (2003) 50(4): 1429-1438), these structures have not been previously visible in negative stain (non-specific) electron micrographs, throwing such speculations into doubt. For example, FIG. 34 presents electron micrographs of GBS serotype III, strain isolate COH1 with a plasmid insert to facilitate the overexpression of GBS 80. This EM photo was produced with a standard negative stain—no pilus structures are distinguishable. In addition, the use of such AI surface proteins in immunogenic compositions for the treatment or prevention of infection against a Gram positive bacteria has not been previously described.

[0435] Surprisingly, Applicants have now identified the presence of GBS 80 in surface exposed pilus formations visible in electron micrographs. These structures are only visible when the electron micrographs are specifically stained against an AI surface protein such as GBS 80. Examples of these electron micrographs are shown in FIGS. 11, 16 and 17, which reveal the presence of pilus structures in wild type COH1 Streptococcus agalactiae. Other examples of these electron

[symbol]

clinical isolate of S. agalactiae, JM9030013. (See FIG. 49.)

[0436] Applicants have also constructed mutant GBS strains containing a plasmid comprising the GBS 80 sequence resulting in the overexpression of GBS 80 within this mutant. The electron micrographs of FIGS. 13-15 are also stained against GBS 80 and reveal long, oligomeric structures containing GBS 80 which appear to cover portions of the surface of the bacteria and stretch far out into the supernatant.

[0437] In some instances, the formation of pili structures on GBS appears to be correlated to surface expression of GBS 80. FIG. 61 provides FAC analysis of GBS 80 surface levels on bacterial strains COH1 and JM9130013 using an anti-GBS 80 antisera. Immunogold electron microscopy of the COH1 and JM9130013 bacteria using anti-GBS 80 antisera demonstrates that JM9130013 bacteria, which have higher values for GBS 80 surface expression, also form longer pili structures.

[0438] The surface exposure of GBS 80 on GBS is generally not capsule-dependent. FIG. 62 provides FACS analysis of capsulated and uncapsulated GBS analyzed with anti-GBS 80 and anti-GBS 322 antibodies. Surface exposure of GBS 80, unlike GBS 322, is not capsule dependent.

[0439] An Adhesin Island surface protein, such as GBS 80 appears to be required for pili formation, as well as an Adhesin Island sortase. Pili are formed in Coh1 bacterial clones that overexpress GBS 80, but lack GBS 104, or one of the AI-1 sortases sag0647 or sag0648. However, pili are not formed in Coh1 bacterial clones that overexpress GBS 80 and lack both sag0647 and sag0648. Thus, for example, it appears that at least GBS 80 and a sortase, sag0647 or sag0648, may be necessary for pili formation. (See FIG. 48.) Overexpression of GBS 80 in GBS strain 515, which lacks an AI-1, also assembles GBS 80 into pili. GBS strain 515 contains an AI-2, and thus AI-2 sortases. The AI-2 sortases in GBS strain 515 apparently polymerize GBS 80 into pili. (See FIG. 42.) Overexpression of GBS 80 in GBS strain 515 cell knocked out for GBS 67 expression also apparently polymerizes GBS 80 into pili. (See FIG. 72.)

[0440] While GBS 80 appears to be required for GBS AI-1 pili formation, GBS 104 and sortase SAG0648 appears to be important for efficient AI-1 pili assembly. For example, high-molecular structures are not assembled in isogenic COH1 strains which lack expression of GBS 80 due to gene disruption and are less efficiently assembled in isogenic COH1 strains which lack the expression of GBS 104 (see FIG. 41). This GBS strain comprises high molecular weight pili structures composed of covalently linked GBS 80 and GBS 104 subunits. In addition, deleting SAG0648 in COH1 bacteria interferes with assembly of some of the high molecular weight pili structures. Thus, indicating that SAG0648 plays a role in assembly of these pilin species. (See FIG. 41).

[0441] EM photos confirm the involvement of AI surface protein GBS 104 within the hyperoligomeric structures of a GBS strain adapted for increased GBS 80 expression. (See FIGS. 34-41 and Example 6). In a wild type serotype VIII GBS strain, strain JM9030013, IEM identifies GBS 104 as forming clusters on the bacterial surface. (See FIG. 50.)

[symbol]

antisera on total cell extracts of Coh1 and a GBS 52 null mutant Coh1 reveal a shift in detected proteins in the Coh1 wild type strain relative to, the GBS 52 null mutant Coh1 strain. The shifted proteins were also detected in the wild type Coh1 bacteria with an anti-GBS 52 antisera, indicating that the GBS 52 may be present in the pilus. (See FIG. 45.)

[0442] In one embodiment, the invention includes a composition comprising oligomeric, pilus-like structures comprising an AI surface protein such as GBS 80. The oligomeric, pilus-like structure may comprise numerous units of AI surface protein. Preferably, the oligomeric, pilus-like structures comprise two or more AI surface proteins. Still more preferably, the oligomeric, pilus-like structure comprises a hyper-oligomeric pilus-like structure comprising at least two (e.g., 2, 3, 4, 5, 6, 7, 8, 9, 10, 11, 12, 13, 14, 15, 20, 25, 30, 35, 40, 45, 50, 60, 70, 80, 90, 100, 120, 140, 150, 200 or more) oligomeric subunits, wherein each subunit comprises an AI surface protein or a fragment thereof. The oligomeric subunits may be covalently associated via a conserved lysine within a pilin motif. The oligomeric subunits may be covalently associated via an LPXTG motif, preferably, via the threonine amino acid residue.

[0443] AI surface proteins or fragments thereof to be incorporated into the oligomeric, pilus-like structures of the invention will preferably include one or both of a pilin motif comprising a conserved lysine residue and an E box motif comprising a conserved glutamic acid residue.

[0444] More than one AI surface protein may be present in the oligomeric, pilus-like structures of the invention. For example, GBS 80 and GBS 104 may be incorporated into an oligomeric structure. Alternatively, GBS 80 and GBS 52 may be incorporated into an oligomeric structure, or GBS 80, GBS 104 and GBS 52 may be incorporated into an oligomeric structure.

[0445] In another embodiment, the invention includes compositions comprising two or more AI surface proteins. The composition may include surface proteins from the same adhesin island. For example, the composition may include two or more GBS AI-1 surface proteins, such as GBS 80, GBS 104 and GBS 52. The surface proteins may be isolated from Gram positive bacteria or they may be produced recombinantly.

[0446] The oligomeric, pilus like structures may be used alone or in the combinations of the invention. In one embodiment, the invention comprises a GBS Adhesin Island protein in oligomeric form, preferably in a hyperoligomeric form. In one embodiment, the invention comprises a composition comprising one or more GBS Adhesin Island 1 (“AI-1”) proteins and one or more GBS Adhesin Island 2 (“AI-2”) proteins, wherein one or more of the Adhesin Island proteins is in the form of an oligomer, preferably in a hyperoligomeric form.

[0447] The oligomeric, pilus-like structures of the invention may be combined with one or more additional GBS proteins. In one embodiment, the oligomeric, pilus-like structures comprise one or more AI surface proteins in combination with a second GBS protein. The second GBS protein may be a known GBS antigen, such as GBS 322 (commonly referred to as “sip”) or GBS 276. Nucleotide and amino acid sequences of GBS 322 sequenced from serotype V isolated strain 2603 V/R are set

[symbol]

NOs: 38 and 39. A particularly preferred GBS 322 polypeptide lacks the N-terminal signal peptide, amino acid residues 1-24. An example of a preferred GBS 322 polypeptide is a 407 amino acid fragment and is shown in SEQ ID NO: 40. Examples of preferred GBS 322 polypeptides are further described in PCTUS04/______, attorney docket number PP20665.002 filed Sep. 15, 2004, hereby incorporated by reference, published as WO 2005/002619.

[0448] Additional GBS proteins which may be combined with the GBS AI surface proteins of the invention are also described in WO 2005/002619. These GBS proteins include GBS 91, GBS 184, GBS 305, GBS 330, GBS 338, GBS 361, GBS 404, GBS 690, and GBS 691.

[0449] Additional GBS proteins which may be combined with the GBS AI surface proteins of the invention are described in WO 02/34771.

[0450] GBS polysaccharides which may be combined with the GBS AI surface proteins of the invention are described in WO 2004/041157. For example, the GBS AI surface proteins of the invention may be combined with a GBS polysaccharides selected from the group consisting of serotype Ia, Ib, Ia/c, II, III, IV, V, VI, VII and VIII.

[0451] The oligomeric, pilus-like structures may be isolated or purified from bacterial cultures in which the bacteria express an AI surface protein. The invention therefore includes a method for manufacturing an oligomeric AI surface antigen comprising culturing a GBS bacterium that expresses the oligomeric AI protein and isolating the expressed oligomeric AI protein from the GBS bacteria. The AI protein may be collected from secretions into the supernatant or it may be purified from the bacterial surface. The method may further comprise purification of the expressed AI protein. Preferably, the AI protein is in a hyperoligomeric form. Macromolecular structures associated with oligomeric pili are observed in the supernatant of cultured GBS strain Coh1. (See FIG. 46.) These pili are found in the supernatant at all growth phases of the cultured Coh1 bacteria. (See FIG. 47.)

[0452] The oligomeric, pilus-like structures may be isolated or purified from bacterial cultures overexpressing an AI surface protein. The invention therefore includes a method for manufacturing an oligomeric Adhesin Island surface antigen comprising culturing a GBS bacterium adapted for increased AI protein expression and isolation of the expressed oligomeric Adhesin Island protein from the GBS bacteria. The AI protein may be collected from secretions into the supernatant or it may be purified from the bacterial surface. The method may further comprise purification of the expressed Adhesin Island protein. Preferably, the Adhesin Island protein is in a hyperoligomeric form.

[0453] The GBS bacteria are preferably adapted to increase AI protein expression by at least two (e.g., 2, 3, 4, 5, 8, 10, 15, 20, 25, 30, 35, 40, 45, 50, 60, 70, 80, 90, 100, 125, 150 or 200) times wild type expression levels.

[0454] GBS bacteria may be adapted to increase AI protein expression by any means known in the art, including methods of increasing gene dosage and methods of gene upregulation. Such means include, for example, transformation of the GBS bacteria with a plasmid encoding the AI protein. The plasmid may include a strong promoter or it may include multiple copies of the sequence encoding the

[symbol]

be deleted. Alternatively, or in addition, the promoter regulating the GBS Adhesin Island may be modified to increase expression.

[0455] GBS bacteria harbouring a GBS AI-1 may also be adapted to increase AI protein expression by altering the number adenosine nucleotides present at two sites in the intergenic region between AraC and GBS 80. See FIG. 197 A, which is a schematic showing the organization of GBS AI-1 and FIG. 197 B, which provides the sequence of the intergenic region between AraC and GBS 80 in the AI. The adenosine tracts which applicants have identified as influencing GBS 80 surface expression are at nucleotide positions 187 and 233 of the sequence shown in FIG. 197 B (SEQ ID NO: 273). Applicants determined the influence of these adenosine tracts on GBS 80 surface expression in strains of GBS bacteria harboring four adenosines at position 187 and six adenosines at position 233, five adenosines at position 187 and six adenosines position 233, and five adenosines at position 187 and seven adenosines at position 233. FACS analysis of these strains using anti GBS 80 antiserum determined that an intergenic region with five adenosines at position 187 and six adenosines at position 233 had higher expression levels of GBS 80 on their surface than other stains. See FIG. 197 C for results obtained from the FACS analysis. Therefore, manipulating the number of adenosines present at positions 187 and 233 of the AraC and GBS 80 intergenic region may further be used to adapt GBS to increase AI protein expression.

[0456] The invention further includes GBS bacteria which have been adapted to produce increased levels of AI surface protein. In particular, the invention includes GBS bacteria which have been adapted to produce oligomeric or hyperoligomeric AI surface protein, such as GBS 80. In one embodiment, the Gram positive bacteria of the invention are inactivated or attenuated to permit in vivo delivery of the whole bacteria, with the AI surface protein exposed on its surface.

[0457] The invention further includes GBS bacteria which have been adapted to have increased levels of expressed AI protein incorporated in pili on their surface. The GBS bacteria may be adapted to have increased exposure of oligomeric or hyperoligomeric AI proteins on its surface by increasing expression levels of a signal peptidase polypeptide. Increased levels of a local signal peptidase expression in Gram positive bacteria (such as LepA in GAS) are expected to result in increased exposure of pili proteins on the surface of Gram positive bacteria. Increased expression of a leader peptidase in GBS may be achieved by any means known in the art, such as increasing gene dosage and methods of gene upregulation. The GBS bacteria adapted to have increased levels of leader peptidase may additionally be adapted to express increased levels of at least one pili protein.

[0458] Alternatively, the AI proteins of the invention may be expressed on the surface of a non-pathogenic Gram positive bacteria, such as Streptococcus gordonii (See, e.g., Byrd et al., “Biological consequences of antigen and cytokine co-expression by recombinant Streptococcus gordonii vaccine vectors”, Vaccine (2002) 20:2197-2205) or Lactococcus lactis (See, e.g., Mannam et al., “Mucosal Vaccine Made from Live, Recombinant Lactococcus lactis Protects Mice against Pharangeal Infection with Streptococcus pyogenes” Infection and Immunity (2004) 72(6):3444-3450). As used herein,

[symbol]

human host subject and are not associated with human pathogenesis. Preferably, the non-pathogenic bacteria are modified to express the AI surface protein in oligomeric, or hyper-oligomeric form. Sequences encoding for an AI surface protein and, optionally, an AI sortase, may be integrated into the non-pathogenic Gram positive bacterial genome or inserted into a plasmid. The non-pathogenic Gram positive bacteria may be inactivated or attenuated to facilitate in vivo delivery of the whole bacteria, with the AI surface protein exposed on its surface. Alternatively, the AI surface protein may be isolated or purified from a bacterial culture of the non-pathogenic Gram positive bacteria. For example, the AI surface protein may be isolated from cell extracts or culture supernatants. Alternatively, the AI surface protein may be isolated or purified from the surface of the non-pathogenic Gram positive bacteria.

[0459] The non-pathogenic Gram positive bacteria may be used to express any of the Gram positive bacterial Adhesin Island proteins described herein, including proteins from a GBS Adhesin Island, a GAS Adhesin Island, or a S pneumo Adhesin Island. The non-pathogenic Gram positive bacteria are transformed to express an Adhesin Island surface protein. Preferably, the non-pathogenic Gram positive bacteria also express at least one Adhesin Island sortase. The AI transformed non-pathogenic Gram positive bacteria of the invention may be used to prevent or treat infection with a pathogenic Gram positive bacteria, such as GBS, GAS or Streptococcus pneumoniae. The non-pathogenic Gram positive bacteria may express the Gram positive bacterial Adhesin Island proteins in oligomeric forms that further comprise adhesin island proteins encoded within the genome of the non-pathogenic Gram positive bacteria.

[0460] Applicants modified L. lactis to demonstrate that it can express GBS AI polypeptides. L. lactis was transformed with a construct encoding GBS 80 under its own promoter and terminator sequences. The transformed L. lactis appeared to express GBS 80 as shown by Western blot analysis using anti-GBS 80 antiserum. See lanes 6 and 7 of the Western Blots provided in FIGS. 133A and 133B (133A and 133B are two different exposures of the same Western blot). See also Example 13.

[0461] Applicants also transformed L. lactis with a construct encoding GBS AI-1 polypeptides GBS 80, GBS 52, SAG0647, SAG0648, and GBS 104 under the GBS 80 promoter and terminator sequences. These L. lactis expressed high molecular weight structures that were immunoreactive with anti-GBS 80 in immunoblots. See FIG. 134, lane 2, which shows detection of a GBS 80 monomer and higher molecular weight polymers in total transformed L. lactis extracts. Thus, it appeared that L. lactis is capable of expressing GBS 80 in oligomeric form. The high molecular weight polymers were not only detected in L. lactis extracts, but also in the culture supernatants. See FIG. 135 at lane 4. See also Example 14. Thus, the GBS AI polypeptides in oligomeric form can be isolated and purified from either L. lactis cell extracts or culture supernatants. These oligomeric forms can, for instance, be isolated from cell extracts or culture supernatants by release by sonication. See FIGS. 136A and B. See also FIG. 171, which shows purification of GBS pili from whole extracts of L. lactis expressing the GBS AI-1 following sonication and gel filtration on a Sephacryl HR 400 column.

[symbol]

GBS 80, GBS 52, SAG0647, SAG0648, and GBS 104 under the GBS 80 promoter and terminator sequences expressed the GBS AI-1 polypeptides on its surface. FACS analysis of these transformed L. lactis detected cell surface expression of both GBS 80 and GBS 104. The surface expression levels of GBS 80 and GBS 104 on the transformed L. lactis were similar to the surface expression levels of GBS 80 and GBS 104 on GBS strains COH1 and JM9130013, which naturally express GBS AI-1. See FIG. 169 for FACS analysis data for L. lactis transformed with GBS AI-1 and wildtype JM9130013 bacteria using anti-GBS 80 and GBS 104 antisera. Table 40 provides the results of FACS analysis of transformed L. lactis, COH1, and JM9130013 bacteria using anti-GBS 80 and anti-GBS 104 antisera. The numbers provided represent the mean fluorescence value difference calculated for immune versus pre-immune sera obtained for each bacterial strain.

TABLE 40
FACS analysis of L. lactis and GBS bacteria strains
expressing GBS AI-1

| | | Anti-GBS 104 |
|---|---|---|
| | Anti-GBS 80 antiserum | antiserum |
| GBS AI-1 transformed | 298 | 251 |
| L. lactis | | |
| GBS COH1 | 305 | 305 |
| GBS JM9130013 | 461 | 355 |

Immunogold-electronmicroscopy performed with anti-GBS 80 primary antibodies detected the presence of pilus structures on the surface of the L. lactis bacteria expressing GBS AI-1, confirming the results of the FACS analysis. See FIGS. 168 B and C. Interestingly, this expression of GBS pili on the surface of the L. lactis induced L. lactis aggregation. See FIG. 170. Thus, GBS AI polypeptides may also be isolated and purified from the surface of L. lactis. The ability of L. lactis to express GBS AI polypeptides on its surface also demonstrates that it may be useful as a host to deliver GBS AI antigens.

[0462] In fact, immunization of mice with L. lactis transformed with GBS AI-1 was protective in a subsequent challenge with GBS. Female mice were immunized with L. lactis transformed with GBS AI-1. The immunized female mice were bred and their pups were challenged with a dose of GBS sufficient to kill 90% of non-immunized pups. Detailed protocols for intranasal and subcutaneous immunization of mice with transformed L. lactis can be found in Examples 18 and 19, respectively. Table 43 provides data showing that immunization of the female mice with L. lactis expressing GBS AI-1 (LL-AI 1) greatly increased survival rate of challenged pups relative to both a negative PBS control (PBS) and a negative L. lactis control (LL 10 E9, which is wild type L. lactis not transformed to express GBS AI-1).

TABLE 43
Protection of Mice Immunized with L. lactis expressing GBS AI-1

| Immunization | | | | Survival | |
|---|---|---|---|---|---|
| Route | Antigen | Alive/Treated | Survival % | % Range | p value |
| Intraperitoneum | Recombinant GBS 80 | 16/18 | 89 | 80-100 | <0.001 |
| Subcutaneous | LL-AI 1 10 E9 | 40/49 | 82 | 70-90 | <0.001 |
| | LL-AI 1 10 E10 | 50/60 | 83 | 60-100 | <0.001 |
| | PBS | 4/30 | 13 | 0-30 | |
| | LL 10 E9 | 3/57 | 5 | 0-20 | |
| Intranasal | LL-AI 1 10 E9 | 22/60 | 37 | 0-100 | 0.02 |
| | LL-AI 1 10 E10 | 31/49 | 63 | 30-90 | <0.001 |
| | LL 10 E9 | 2/27 | 7 | 0-20 | |

[0463] Table 51 provides further evidence that immunization of mice with L. lactis transformed with GBS AI-1 is protective against GBS.

TABLE 51
Further Protection of Mice Immunized with L. lactis
expressing GBS AI-1

| | Immunization | Alive/ | Survival % |
|---|---|---|---|
| Antigen | route | Treated | (Pval <0.0000001) |
| Recombinant GBS 80 | IP | 48/50 | 92 |
| Recombinant GBS 80 | SC | 21/30 | 70 |
| L. lactis + AI1 10⁶ cfu | SC | 6/66 | 9 |
| L. lactis + AI1 10⁷ cfu | SC | 47/70 | 73 |
| L. lactis + AI1 10⁸ cfu | SC | 116/153 | 76 |
| L. lactis + AI1 10⁹ cfu | SC | 98/118 | 83 |
| L. lactis + AI1 10¹⁰ cfu | SC | 107/129 | 83 |
| L. lactis 10¹⁰ cfu | SC | 4/83 | 5 |
| PBS | SC | 6/110 | 5 |
| L. lactis + AI1 10¹⁰ cfu | IN | 51/97 | 52 |
| L. lactis 10¹¹ cfu | IN | 1/40 | 7 |
| PBS | IN | 0/37 | 0 |

[0464] Protection of immunized mice with L. lactis expressing the GBS AI-1 is at least partly due to a newly raised antibody response. Table 46 provides anti-GBS 80 antibody titers detected in serum of the mice immunized with L. lactis expressing the GBS AI-1 as described above. Mice immunized with L. lactis expressing the GBS AI-1 have anti-GBS 80 antibody titers, which are not observed in mice immunized with L. lactis not transformed to express the GBS AI-1. Further, as expected from the survival data, mice subcutaneously immunized with L. lactis transformed to express the GBS AI-1 have significantly higher serum anti-GBS 80 antibody titers than mice intranasally immunized with L. lactis transformed to express the GBS AI-1.

TABLE 46
Antibody Responses against GBS 80 in Serum of Mice
Immunized with L. lactis Expressing GBS AI-1

| | Ab Titre Obtained Following | | |
|---|---|---|---|
| | Subcutaneous | Intranasal | Intraperitoneal |
| Antigen | Immunization | Immunization | Immunization |
| LL 10 E9 | 0 | 0 | |
| LL-AI 1 10 E9 | 14000 | 50 | |
| LL-AI 1 10 E10 | 25000 | 406 | |
| Recombinant GBS 80 | | | 120000 |

[0465] Anti-GBS 80 antibodies of the IgA isotype were specifically detected in various body fluids of the mice subcutaneously or intranasally immunized with L. lactis expressing the GBS AI-1.

TABLE 47
Anti-GBS 80 IgA Antibodies Detected in Mouse Tissues
Following Immunization with L. lactis Expressing GBS AI-1

| | | Anti-GBS 80 IgA | | |
|---|---|---|---|---|
| | | Antibodies Detected in | | |
| Antigen | Immunization route | Serum | Vaginal Wash | Nasal Wash |
| LL 10 E9 | | 0 | 0 | 0 |
| LL-AI 1 | Subcutaneous | 0 | 25 | 20 |
| LL-AI 1 | Intranasal | 140 | 0 | 150 |
| GBS 80 | Intraperitoneal | 60 | 0 | |

[0466] Furthermore, opsonophagocytosis assays also demonstrated that at least some of the antiserum produced against the L. lactis expressing GBS AI 1 is opsonic for GBS. See FIG. 161.

[0467] To obtain protection of against GBS across a greater number of strains and serotypes, it is possible to transform L. lactis with a recombinant GBS AI encoding both GBS AI-1 and AI-2, i.e., a hybrid GBS AI. By way of example, a hybrid GBS AI may be a GBS AI-1 with a replacement of the GBS 104 gene with a GBS 67 gene. A schematic of such a hybrid GBS AI is depicted in FIG. 231 A. A hybrid GBS AI may alternatively be a GBS AI-1 with a replacement of the GBS 52 gene with a GBS 59 gene. See the schematic at FIG. 231 B. Alternatively, a hybrid GBS AI may be a GBS AI-1 with a substitution of a GBS 59 polypeptide for the GBS 52 gene and a substitution of the GBS 104 gene for genes encoding GBS 59 and the two GBS AI-2 sortases. Another example of a hybrid GBS AI is a GBS AI-1 with the substitution of a GBS 59 gene for the GBS 52 gene and a GBS 67 for the GBS 104 gene. See the schematic at FIG. 232. A further example of a hybrid GBS AI is a GBS AI-1 having a GBS 59 gene and genes encoding the GBS AI-2 sortases in place of the GBS 52 gene. Yet another example of a hybrid GBS AI is a GBS AI-1 with a substitution of either GBS 52 or GBS 104 with a fusion protein comprising GBS 322 and one of GBS 59, GBS 67, or GBS 150. Some of these hybrid GBS AIs may be prepared as briefly outlined in FIG. 234 A-F.

[0468] Applicants have prepared a hybrid GBS AI having a GBS AI-1 sequence with a substitution of a GBS 67 coding sequence for the GBS 104 gene as depicted in FIG. 231 A. Transformation of L. lactis with the hybrid GBS AI-1 resulted in L. lactis expression of high molecular weight polymers containing the GBS 80 and GBS 67 proteins. See FIG. 233 A, which provides Western blot analysis of L. lactis transformed with the hybrid GBS AI depicted in FIG. 231 A. When L. lactis transformed with the hybrid GBS AI were probed with antibodies to GBS 80 or GBS 67, high molecular weight structures were detected. See lanes labelled LL+a) in both the α-80 and α-67 immunoblots. The GBS 80 and GBS 67 proteins were confirmed to be present on the surface of L. lactis by FACS analysis. See FIG. 233 B, which shows a shift in fluorescence when GBS 80 and GBS 67 antibodies are used to detect GBS 80 and GBS 67 surface expression. The same shifts in fluorescence were not observed in L. lactis control cells, cells not transformed with the hybrid GBS AI.

[0469] Alternatively, the oligomeric, pilus-like structures may be produced recombinantly. If produced in a recombinant host cell system, the AI surface protein will preferably be expressed in coordination with the expression of one or more of the AI sortases of the invention. Such AI sortases will facilitate oligomeric or hyperoligomeric formation of the AI surface protein subunits.

[symbol]

amino acid residues. They may also include a transmembrane sequence within 50 amino acid residues of the C terminus. The sortases may also include at least one basic amino acid residue within the last 8 amino acids. Preferably, the sortases have one or more active site residues, such as a catalytic cysteine and histidine.

[0470] As shown in FIG. 1, AI-1 includes the surface exposed proteins of GBS 80, GBS 52 and GBS 104 and the sortases SAG0647 and SAG0648. AI-1 typically appears as an insertion into the 3′ end of the trmA gene.

[0471] In addition to the open reading frames encoding the AI-1 proteins, AI-1 may also include a divergently transcribed transcriptional regulator such as araC (i.e., the transcriptional regulator is located near or adjacent to the AI protein open reading frames, but it transcribed in the opposite direction). It is believed that araC may regulate the expression of the AI operon. (See Korbel et al., Nature Biotechnology (2004) 22(7): 911-917 for a discussion of divergently transcribed regulators in E. coli).

[0472] AI-1 may also include a sequence encoding a rho independent transcriptional terminator (see hairpin structure in FIG. 1). The presence of this structure within the adhesin island is thought to interrupt transcription after the GBS 80 open reading frame, leading to increased expression of this surface protein.

[0473] A schematic identifying AI-1 within several GBS serotypes is depicted in FIG. 2. AI-1 sequences were identified in GBS serotype V, strain isolate 2603; GBS serotype III, strain isolate NEM316; GBS serotype II, strain isolate 18RS21; GBS serotype V, strain isolate CJB111; GBS serotype III, strain isolate COH1 and GBS serotype 1a, strain isolate A909. (Percentages shown are amino acid identity to the 2603 sequence). (An AI-1 was not identified in GBS serotype 1b, strain isolate H36B or GBS serotype 1a, strain isolate 515).

[0474] An alignment of AI-1 polynucleotide sequences from serotype V, strain isolates 2603 and CJB111; serotype II, strain isolate 18RS21; serotype III, strain isolates COH1 and NEM316; and serotype 1a, strain isolate A909 is presented in FIG. 18. An alignment of amino acid sequences of AI-1 surface protein GBS 80 from serotype V, strain isolates 2603 and CJB111; serotype 1a, strain isolate A909; serotype III, strain isolates COH1 and NEM316 is presented in FIG. 22. An alignment of amino acid sequences of AI-1 surface protein GBS 104 from serotype V, strain isolates 2603 and CJB111; serotype III, strain isolates COH1 and NEM316; and serotype II, strain isolate 18RS21 is presented in FIG. 23. Preferred AI-1 polynucleotide and amino acid sequences are conserved among two or more GBS serotypes or strain isolates.

[0475] As shown in this figure, the full length of surface protein GBS 80 is particularly conserved among GBS serotypes V (strain isolates 2603 and CJBIII), III (strain isolates NEM316 and COH1), and Ia (strain isolate A909). The GBS 80 surface protein is missing or fragmented in serotypes II (strain isolate 18RS21), Ib (strain isolate H36B) and Ia (strain isolate 515).

[0476] Polynucleotide and amino acid sequences for AraC are set forth in FIG. 30.

[symbol]

[0477] A second adhesin island, “Adhesin Island 2” or “AI-2” or “GBS AI-2” has also been identified in numerous GBS serotypes. A schematic depicting the correlation between AI-1 and AI-2 within the GBS serotype V, strain isolate 2603 is shown in FIG. 3. (Homology percentages in S FIG. 3 represent amino acid identity of the AI-2 proteins to the AI-1 proteins). Alignments of AI-2 polynucleotide sequences are presented in FIGS. 20 and 21 (FIG. 20 includes sequences from serotype V, strain isolate 2603 and serotype III, strain isolate NEM316. FIG. 21 includes sequences from serotype III, strain isolate COH1 and serotype Ia, strain isolate A909). An alignment of amino acid sequences of AI-2 surface protein GBS 067 from serotype V, strain isolates 2603 and CJB111; serotype 1a, strain isolate 515; serotype II, strain isolate 18RS21; serotype Ib, strain isolate H36B; and serotype III, strain isolate NEM316 is presented in FIG. 24. Preferred AI-2 polynucleotide and amino acid sequences are conserved among two or more GBS serotypes or strain isolates.

[0478] AI-2 comprises a series of approximately five open reading frames encoding for a collection of amino acid sequences comprising surface proteins and sortases. Specifically, AI-2 includes open reading frames encoding for two or more (i.e., 2, 3, 4, 5 or more) of GBS 67, GBS 59, GBS 150, SAG1405, SAG1406, 01520, 01521, 01522, 01523, 01523, 01524 and 01525. In one embodiment, AI-2 includes open reading frames encoding for two or more of GBS 67, GBS 59, GBS 150, SAG1405, and SAG1406. Alternatively, AI-2 may include open reading frames encoding for two or more of 01520, 01521, 01522, 01523, 01523, 01524 and 01525.

[0479] One or more of the surface proteins typically include an LPXTG motif (such as LPXTG (SEQ ID NO: 122)) or other sortase substrate motif. The GBS AI-2 sortase proteins are thought to be involved in the secretion and anchoring of the LPXTG containing surface proteins. GBS AI-2 may encode for at least one surface protein. Alternatively, AI-2 may encode for at least two surface proteins and at least one sortase. Preferably, GBS AI-2 encodes for at least three surface proteins and at least two sortases. One or more of the AI-2 surface proteins may include an LPXTG or other sortase substrate motif.

[0480] One or more of the surface proteins may also typically include pilin motif. The pilin motif may be involved in pili formation. Cleavage of AI surface proteins by sortase between the threonine and glycine residue of an LPXTG motif yields a thioester-linked acyl intermediate of sortase. The first lysine residue in a pilin motif can serve as an amino group acceptor of the cleaved LPXTG motif and thereby provide a covalent linkage between AI subunits to form pili. For example, the pilin motif can make a nucleophilic attack on the acyl enzyme providing a covalent linkage between AI subunits to form pili and regenerate the sortase enzyme. Some examples of pilin motifs that may be present in the GBS AI-2 proteins include ((YPKN(X₈)K; SEQ ID NO: 158), (PK(X₈)K; SEQ ID NO: 159), (YPK(X₉)K; SEQ ID NO: 160), (PKN(X₈)K; SEQ ID NO: 161), or (PK(X₁₀)K; SEQ ID NO: 162)).

[0481] One or more of the surface protein may also include an E box motif. The E box motif contains a conserved glutamic acid residue that is believed to be necessary for pilus formation. Some examples of E box motifs may include the amino acid sequences YxLxETxAPxG (SEQ ID NO: 163),

[symbol]

### (SEQ ID NO: 152).

[0482] As shown in FIG. 3, GBS AI-2 may include the surface exposed proteins of GBS 67, GBS 59 and GBS 150 and the sortases of SAG1406 and SAG1405. Alternatively, GBS AI-2 may include the proteins 01521, 01524 and 01525 and sortases 01520 and 01522. GBS 067 and 01524 are preferred AI-2 surface proteins.

[0483] AI-2 may also include a divergently transcribed transcriptional regulator such as a RofA like protein (for example rogB). As in AI-1, rogB is thought to regulate the expression of the AI-2 operon.

[0484] A schematic depiction of AI-2 within several GBS serotypes is depicted in FIG. 4. (Percentages shown are amino acid identity to the 2603 sequence). While the AI-2 surface proteins GBS 59 and GBS 67 are more variable across GBS serotypes than the corresponding AI-1 surface proteins, AI-2 surface protein GBS 67 appears to be conserved in GBS serotypes where the AI-1 surface proteins are disrupted or missing.

[0485] For example, as discussed above and in FIG. 2, the AI-1 GBS 80 surface protein is fragmented in GBS serotype II, strain isolate 18RS21. Within AI-2 for this same sequence, as shown in FIG. 4, the GBS 67 surface protein has 99% amino acid sequence homology with the corresponding sequence in strain isolate 2603. Similarly, the AI-1 GBS 80 surface protein appears to be missing in GBS serotype Ib, strain isolate H36B and GBS serotype Ia, strain isolate 515. Within AI-2 for these sequences, however, the GBS 67 surface protein has 97-99% amino acid sequence homology with the corresponding sequence in strain isolate 2603. GBS 67 appears to have two allelic variants, which can be divided according to percent homology with strains 2603 and H36B. See FIGS. 237-239.

[0486] Unlike for GBS 67, amino acid sequence identity of GBS 59 is variable across different GBS strains. As shown in FIGS. 63 and 224, GBS 59 of GBS strain isolate 2603 shares 100% amino acid residue homology with GBS strain 18RS21, 62% amino acid sequence homology with GBS strain H36B, 48% amino acid residue homology with GBS strain 515 and GBS strain CJB111, and 47% amino acid residue homology with GBS strain NEM316. The amino acid sequence homologies of the different GBS strains suggest that there are two isoforms of GBS 59. The first isoform appears to include the GBS 59 protein of GBS strains CJB111, NEM316, and 515. The second isoform appears to include the GBS 59 protein of GBS strains 18RS21, 2603, and H36B. (See FIGS. 63 and 224.)

[0487] As expected from the variability in GBS 59 isoforms, antibodies specific for the first GBS 59 isoform detect the first but not the second GBS 59 isoform and antibodies specific for the second GBS 59 isoform detect the second but not the first GBS 59 isoform. See FIG. 226A, which shows FACS analysis of 28 GBS strains having a GBS 59 gene detected using PCR for GBS 59 surface expression. For each of the 28 GBS strains, FACS analysis was performed using either an antibody for GBS 59 isoform 1 (α-cjb111) or GBS 59 isoform 2 (α-2603). Only one of the two antibodies detected GBS 59 surface expression on each GBS strain. As a negative control, GBS strains in which a GBS 59

[symbol]

### 226B.

[0488] Also, GBS 59 is opsonic only against GBS strains expressing a homologous GBS 59 protein. See FIG. 225.

[0489] In one embodiment, the immunogenic composition of the invention comprises a first and a second isoform of the GBS 59 protein to provide protection across a wide range of GBS serotypes that express polypeptides from a GBS AI-2. The first isoform may be the GBS 59 protein of GBS strain CJB111, NEM316, or 515. The second isoform may be the GBS 59 protein of GBS strain 18RS21, 2603, or H36B.

[0490] The gene encoding GBS 59 has been identified in a high number of GBS isolates; the GBS 59 gene was detected in 31 of 40 GBS isolates tested (77.5%). The GBS 59 protein also appears to be present as part of a pilus in whole extracts derived from GBS strains. FIG. 64 shows detection of high molecular weight GBS 59 polymers in whole extracts of GBS strains CJB111, 7357B, COH31, D1363C, 5408, 1999, 5364, 5518, and 515 using antiserum raised against GBS 59 of GBS strain CJB111. FIG. 65 also shows detection of these high molecular weight GBS 59 polymers in whole extracts of GBS strains D136C, 515, and CJB111 with anti-GBS 59 antiserum. (See also FIG. 220 A for detection of GBS 59 high molecular weight polymers in strain 515.) FIG. 65 confirms the presence of different isoforms of GBS 59. Antisera raised against two different GBS 59 isoforms results in different patterns of immunoreactivity depending on the GBS strain origin of the whole extract. FIG. 65 further shows detection of GBS 59 monomers in purified GBS 59 preparations.

[0491] GBS 59 is also highly expressed on the surface of GBS strains. GBS 59 was detected on the surface of GBS strains CJB111, DK1, DK8, Davis, 515, 2986, 5551, 1169, and 7357B by FACS analysis using mouse antiserum raised against GBS 59 of GBS CJB111. FACS analysis did not detect surface expression of GBS 59 in GBS strains SMU071, JM9130013, and COH1, which do not contain a GBS 59 gene. (See FIG. 66.) Further confirmation that GBS 59 is expressed on the surface of GBS is detection of GBS 59 by immuno-electron microscopy on the surface of GBS strain 515 bacteria. See FIG. 215.

[0492] GBS 67 and GBS 150 also appear to be included in high molecular weight structures, or pili. FIG. 69 shows that anti-GBS 67 and anti-GBS 150 immunoreact with high molecular weight structures in whole GBS strain 515 extracts. (See also FIGS. 220 B and C.) It is also notable in FIG. 69 that the anti-GBS 59 antisera, raised in a mouse following immunization with GBS 59 of GBS strain 2603, does not cross-hybridize with BS 59 in CBS strain 515. GBS 59 of CBS stain 515 is of a different isotype than GBS 59 of GBS stain 2603. See FIG. 63, which illustrates that the homology of these two CBS 59 polypeptides is 48%, and FIG. 65, which confirms that GBS 59 antisera raised against GBS strain 2603 does not cross-hybridize with GBS 59 of GBS strain 515.

[0493] Formation of pili containing GBS 150 does not appear to require GBS 67 expression. FIG. 70 provides Western blots showing that higher molecular weight structures in GBS strain 515 total

[symbol]

GBS 67 expression, anti-GBS 67 antiserum no longer immunoreacts with polypeptides in total extracts, while anti-GBS 150 antiserum is still able to cross-hybridize with high molecular weight structures.

[0494] Likewise, formation of pili containing GBS 59 does not appear to require GBS 67 expression. As expected, FACS detects GBS 67 cell surface expression on wildtype GBS strain 515, but not GBS strain 515 cells knocked out for GBS 67. FACS analysis using anti-GBS 59 antisera, however, detects GBS 59 expression on both the wildtype GBS strain 515 cells and the GBS strain 515 cells knocked out for GBS 67. Thus, GBS 59 cell surface expression is detected on GBS stain 515 cells regardless of GBS 67 expression.

[0495] GBS 67, while present in pili, appears to be localized around the surface of GBS strain 515 cells. See the immuno-electron micrographs presented in FIG. 216. GBS 67 binds to fibronectin. See FIG. 217.

[0496] Formation of pili encoded by GBS AI-2 does require expression of GBS 59. Deletion of GBS 59 from strain 515 bacteria eliminates detection of high molecular weight structures by antibodies that bind to GBS 59 (FIG. 221 A, lane 3), GBS 67 (FIG. 221B, lane 3), and GBS 150 (FIG. 221 C, lane 3). By contrast, Western blot analysis of 515 bacteria with a deletion of the GBS 67 gene detects high molecular weight structures using GBS 59 (FIG. 221 A, lane 2) and GBS 150 (FIG. 221 C, lane 2) antisera. Similarly, Western blot analysis of 515 bacteria with a deletion of the GBS 150 gene detects high molecular weight structures using GBS 59 (FIG. 221 A, lane 4) and GBS 67 (FIG. 221 B, lane 4). See also FIG. 223, which provides Western blots of each of the 515 strains interrogated with antibodies for GBS 59, GBS 67, and GBS 150. FACS analysis of strain 515 bacteria deleted for either GBS 59 or GBS 67 confirms these results. See FIG. 222, which shows that only deletion of GBS 59 abolishes surface expression of both GBS 59 and GBS 67.

[0497] Formation of pili encoded by GBS AI-2 also requires expression of both GBS adhesin island-2 encoded sortases. See FIG. 218, which provides Western blot analysis of strain 515 bacteria lacking Srt1, Srt2, or both Srt1 and Srt2. Only deletion of both Srt1 and Srt2 abolishes pilus assembly as detected by antibodies that cross-hybridize with each of GBS 59, GBS 67 and GBS 150. The results of the Western blot analysis were verified by FACS, which provided similar results. See FIG. 219.

[0498] As shown in FIG. 4, two of the GBS strain isolates (COH 1 and A909) do not appear to contain homologues to the surface proteins GBS 59 and GBS 67. For these two strains, the percentages shown in FIG. 4 are amino acid identity to the COH1 protein). Notwithstanding the difference in the surface protein lengths for these two strains, AI-2 within these sequences still contains two sortase proteins and three LPXTG containing surface proteins, as well as a signal peptidase sequence leading into the first surface protein. One of the surface proteins in this variant of AI-2, spb1, has previously been identified as a potential adhesion protein. (See Adderson et al., Infection and Immunity (2003) 71(12):6857-6863). Alternatively, because of the lack of GBS 59

[symbol]

### GBS AI-3).

[0499] More than one AI surface protein may be present in the oligomeric, pilus-like structures of the invention. For example, GBS 59 and GBS 67 may be incorporated into an oligomeric structure. Alternatively, GBS 59 and GBS 150 may be incorporated into an oligomeric structure, or GBS 59, GBS 150 and GBS 67 may be incorporated into an oligomeric structure.

[0500] In another embodiment, the invention includes compositions comprising two or more AI surface proteins. The composition may include surface proteins from the same adhesin island. For example, the composition may include two or more GBS AI-2 surface proteins, such as GBS 59, GBS 67 and GBS 150. The surface proteins may be isolated from Gram positive bacteria or they may be produced recombinantly.

### GAS Adhesin Islands

[0501] As discussed above, Applicants have identified at least four different GAS Adhesin Islands. These adhesion islands are thought to encode surface proteins which are important in the bacteria's virulence, and Applicants have obtained the first electron micrographs revealing the presence of these adhesin island proteins in hyperoligomeric pilus structures on the surface of Group A Streptococcus.

[0502] Group A Streptococcus is a human specific pathogen which causes a wide variety of diseases ranging from pharyngitis and impetigo through life threatening invasive disease and necrotizing fascilitis. In addition, post-streptococcal autoimmune responses are still a major cause of cardiac pathology in children.

[0503] Group A Streptococcal infection of its human host can generally occur in three phases. The first phase involves attachment and/or invasion of the bacteria into host tissue and multiplication of the bacteria within the extracellular spaces. Generally this attachment phase begins in the throat or the skin. The deeper the tissue level infected, the more severe the damage that can be caused. In the second stage of infection, the bacteria secretes a soluble toxin that diffuses into the surrounding tissue or even systemically through the vasculature. This toxin binds to susceptible host cell receptors and triggers innappropropriate immune responses by these host cells, resulting in pathology. Because the toxin can diffuse throughout the host, the necrosis directly caused by the GAS toxins may be physically located in sites distant from the bacterial infection. The final phase of GAS infection can occur long after the original bacteria have been cleared from the host system. At this stage, the host's previous immune response to the GAS bacteria due to cross reactivity between epitopes of a GAS surface protein, M, and host tissues, such as the heart. A general review of GAS infection can be found in Principles of Bacterial Pathogeneis, Groisman ed, Chapter 15 (2001).

[0504] In order to prevent the pathogenic effects associated with the later stages of GAS infection, an effective vaccine against GAS will preferably facilitate host elimination of the bacteria during the initial attachment and invasion stage.

[symbol]

protein described above. The M protein is surface exposed trypsin-sensitive protein generally comprising two polypeptide chains complexed in an alpha helical formation. The carboxyl terminus is anchored in the cytoplasmic membrane and is highly conserved among all group A streptococci. The amino terminus, which extend through the cell wall to the cell surface, is responsible for the antigenic variability observed among the 80 or more serotypes of M proteins.

[0505] A second layer of classification is based on a variable, trypsin-resistant surface antigen, commonly referred to as the T-antigen. Decades of epidemiology based on M and T serological typing have been central to studies on the biological diversity and disease causing potential of Group A Streptococci. While the M-protein component and its inherent variability have been extensively characterized, even after five decades of study, there is still very little known about the structure and variability of T-antigens. Antisera to define T types is commercially available from several sources, including Sevapharma (http://www.sevapharma.cz/en).

[0506] The gene coding for one form of T-antigen, T-type 6, from an M6 strain of GAS (D741) has been cloned and characterized and maps to an approximately 11 kb highly variable pathogenicity island. Schneewind et al., J Bacteriol. (1990) 172(6):3310-3317. This island is known as the Fibronectin-binding, Collagen-binding T-antigen (FCT) region because it contains, in addition to the T6 coding gene (tee6), members of a family of genes coding for Extra Cellular Matrix (ECM) binding proteins. Bessen et al., Infection & Immunity (2002) 70(3): 1159-1167. Several of the protein products of this gene family have been shown to directly bind either fibronectin and/or collagen. See Hanski et al., Infection & Immunity (1992) 60(12):5119-5125; Talay et al., Infection & Immunity (1992(60(9):3837-3844; Jaffe et al. (1996) 21(2):373-384; Rocha et al., Adv Exp Med Biol. (1997) 418:737-739; Kreikemeyer et al., J Biol Chem (2004) 279(16):15850-15859; Podbielski et al., Mol. Microbiol. (1999) 31(4):1051-64; and Kreikemeyer et al., Int. J. Med Microbiol (2004) 294(2-3):177-88. In some cases direct evidence for a role of these proteins in adhesion and invasion has been obtained.

[0507] Applicants raised antiserum against a recombinant product of the tee6 gene and used it to explore the expression of T6 in M6 strain 2724. In immunoblot of mutanolysin extracts of this strain, the antiserum recognized, in addition to a band corresponding to the predicted molecular mass of the product, very high molecular weight ladders ranging in mobility from about 100 kDa to beyond the resolution of the 3-8% gradient gels used.

[0508] This pattern of high molecular weight products is similar to that observed in immunoblots of the protein components of the pili identified in Streptococcus agalactiae (described above) and previously in Corynebacterium diphtheriae. Electron microscopy of strain M6_{—}2724 with antisera specific for the product of tee6 revealed abundant surface staining and long pilus like structures extending up to 700 nanometers from the bacterial surface, revealing that the T6 protein, one of the antigens recognized in the original Lancefiled serotyping system, is located within a GAS Adhesin Island (GAS AI-1) and forms long covalently linked pilus structures.

[symbol]

While these GAS AI sequences can be identified in numerous M types, Applicants have surprisingly discovered a correlation between the four main pilus subunits from the four different GAS AI types and specific T classifications. While other trypsin-resistant surface exposed proteins are likely also implicated in the T classification designations, the discovery of the role of the GAS adhesin islands (and the associated hyper-oligomeric pilus like structures) in T classification and GAS serotype variance has important implications for prevention and treatment of GAS infections. Applicants have identified protein components within each of the GAS adhesin islands which are associated with the pilus formation. These proteins are believed to be involved in the bacteria's initial adherence mechanisms. Immunological recognition of these proteins may allow the host immune response to slow or prevent the bacteria's transition into the more pathogenic later stages of infection.

[0509] In addition, Applicants have discovered that the GBS pili structures appear to be implicated in the formation of biofilms (populations of bacteria growing on a surface, often enclosed in an exopolysaccharide matrix). Biofilms are generally associated with bacterial resistance, as antibiotic treatments and host immune response are frequently unable to eradicate all of the bacteria components of the biofilm. Direction of a host immune response against surface proteins exposed during the first steps of bacterial attachment (i.e., before complete biofilm formation) is preferable.

[0510] The invention therefore provides for improved immunogenic compositions against GAS infection which may target GAS bacteria during their initial attachment efforts to the host epithelial cells and may provide protection against a wide range of GAS serotypes. The immunogenic compositions of the invention include GAS AI surface proteins which may be formulated in an oligomeric, or hyperoligomeric (pilus) form. The invention also includes combinations of GAS AI surface proteins. Combinations of GAS AI surface proteins may be selected from the same adhesin island or they may be selected from different GAS adhesin islands.

[0511] While there is surprising variability in the number and sequence of the GAS AI components across isolates, GAS AI sequences may be generally characterized as Type 1, Type 2, Type 3, and Type 4, depending on the number and type of sortase sequence within the island and the percentage identity of other proteins within the island. Schematics of the GAS adhesin islands are set forth in FIG. 51A and FIG. 162. In all strains identified so far, the adhesin island region is flanked by highly conserved open reading frames M1_{—}123 and M1_{—}136. Between three and five genes in each GAS adhesin island code for ECM binding adhesin proteins containing LPXTG motifs.

### GAS Adhesin Island 1

[0512] As discussed above, Applicants have identified adhesin islands, “GAS Adhesin Island 1” or “GAS AI-1”, within the genome Group A Streptococcus serotypes and isolates. GAS AI-1 comprises a series of approximately five open reading frames encoding for a collection of amino acid sequences comprising surface proteins and sortases (“GAS AI-1 proteins”). GAS AI-1 preferably comprises surface proteins, a srtB sortase, and a rofA divergently transcribed transcriptional regulator. GAS AI-1 surface proteins may include a fibronectin binding protein, a collagen adhesion protein and a

[symbol]

sortase substrate motif, such as LPXTG (SEQ ID NO: 122) or LPXSG (SEQ ID NO: 134) (conservative replacement of threonine with serine). Specifically, GAS AI-1 includes open reading frames encoding for two or more (i.e., 2, 3, 4 or 5) of M6_Spy0157, M6_Spy0158, M6_Spy0159, M6_Spy0160, M6_Spy0161.

[0513] Applicants have also identified open reading frames encoding fimbrial structural subunits in other GAS bacteria harbouring an AI-1. These open reading frames encode fimbrial structural subunits CDC SS 410_fimbrial, ISS3650_fimbrial, and DSM2071_fimbrial. A GAS AI-1 may comprise a polynucleotide encoding any one of CDC SS 410_fimbrial, ISS3650_fimbrial, and DSM2071_fimbrial.

[0514] As discussed above, the hyper-oligomeric pilus structure of GAS AI-1 appears to be responsible for the T-antigen type 6 classification, and GAS AI-1 corresponds to the FCT region previously identified for tee6. As in GAS AI-1, the tee6 FCT region includes open reading frames encoding for a collagen adhesion protein (cpa, capsular polysaccharide adhesion) and a fibronectin binding protein (prtF1). Immunoblots of tee6, a GAS AI-1 fimbrial structural subunit corresponding to M6_Spy160, reveal high molecular weight structures indicative of the hyper-oligomeric pilus structures. Immunoblots with antiserum specific for Cpa also recognize a high molecular weight ladder structure, indicating Cpa involvement in the GAS AI-1 pilus structure or formation. In EM photos of GAS bacteria, Cpa antiserum reveals abundant staining on the surface of the bacteria and occasional gold particles extended from the surface of the bacteria. In contrast, immunoblots with antiserum specific for PrtF1 recognize only a single molecular species with electrophoretic mobility corresponding to its predicted molecular mass, indicating that PrtF1 may not be associated with the oligomeric pilus structure. A preferred immunogenic composition of the invention comprises a GAS AI-1 surface protein which may be formulated or purified in an oligomeric (pilus) form. In a preferred embodiment, the oligomeric form is a hyperoligomer. Another preferred immunogenic composition of the invention comprises a GAS AI-1 surface protein which has been isolated in an oligomeric (pilus) form. The oligomer or hyperoligomeric pilus structures comprising the GAS AI-1 surface proteins may be purified or otherwise formulate for use in immunogenic compositions.

[0515] One or more of the GAS AI-1 open reading frame polynucleotide sequences may be replaced by a polynucleotide sequence coding for a fragment of the replaced ORF. Alternatively, one or more of the GAS AI-1 open reading frames may be replaced by a sequence having sequence homology to the replaced ORF.

[0516] One or more of the GAS AI-1 surface protein sequences typically include an LPXTG motif (such as LPXTG (SEQ ID NO: 122)) or other sortase substrate motif.

[0517] The LPXTG sortase substrate motif of a GAS AI surface protein may be generally represented by the formula XXXXG, wherein X at amino acid position 1 is an L, a V, an E, or a Q, wherein X at amino acid position 2 is a P if X at amino acid position 1 is an L, wherein X at amino acid position 2 is a V if X at amino acid position 1 is a E or a Q, wherein X at amino acid position 2 is

[symbol]

residue, wherein X at amino acid position 4 is a T if X at amino acid position 1 is a V, E, or Q, and wherein X at amino acid position 4 is a T, S, or A if X at amino acid position 1 is an L. Some examples of LPXTG motifs present in GAS AI surface proteins include LPSXG (SEQ ID NO: 134), VVXTG (SEQ ID NO: 135), EVXTG (SEQ ID NO: 136), VPXTG (SEQ ID NO: 137), QVXTG (SEQ ID NO: 138), LPXAG (SEQ ID NO: 139), QVPTG (SEQ ID NO: 140), and FPXTG (SEQ ID NO: 141).

[0518] The GAS AI surface proteins of the invention may affect the ability of the GAS bacteria to adhere to and invade epithelial cells. AI surface proteins may also affect the ability of GAS to translocate through an epithelial cell layer. Preferably, one or more GAS AI surface proteins are capable of binding to or otherwise associating with an epithelial cell surface. GAS AI surface proteins may also be able to bind to or associate with fibrinogen, fibronectin, or collagen.

[0519] The GAS AI-1 sortase proteins are predicted to be involved in the secretion and anchoring of the LPXTG containing surface proteins. GAS AI-1 may encode for at least one surface protein. Alternatively, GAS AI-1 may encode for at least two surface exposed proteins and at least one sortase. Preferably, GAS AI-1 encodes for at least three surface exposed proteins and at least two sortases.

[0520] The AI surface proteins may be covalently attached to the bacterial cell wall by membrane-associated transpeptidases, such as an AI sortase. The sortase may function to cleave the surface protein, preferably between the threonine and glycine residues of an LPXTG motif. The sortase may then assist in the formation of an amide link between the threonine carboxyl group and a cell wall precursor such as lipid II. The precursor can then be incorporated into the peptidoglycan via the transglycoslylation and transpeptidation reactions of bacterial wall synthesis. See Comfort et al., Infection & Immunity (2004) 72(5): 2710-2722.

[0521] GAS AI-1 preferably includes a srtB sortase. GAS srtB sortases may preferably anchor surface proteins with an LPSTG motif (SEQ ID NO: 166), particularly where the motif is followed by a serine.

[0522] In one embodiment, the invention includes a composition comprising oligomeric, pilus-like structures comprising a GAS AI-1 surface protein such as M6_Spy0157, M6_Spy0159, M6_Spy0160, CDC SS 410_fimbrial, ISS3650_fimbrial, or DSM2071_fimbrial. The oligomeric, pilus-like structure may comprise numerous units of AI surface protein. Preferably, the oligomeric, pilus-like structures comprise two or more AI surface proteins. Still more preferably, the oligomeric, pilus-like structure comprises a hyper-oligomeric pilus-like structure comprising at least two (e.g. 2, 3, 4, 5, 6, 7, 8, 9, 10, 11, 12, 13, 14, 15, 20, 25, 30, 35, 40, 45, 50, 60, 70, 80, 90, 100, 120, 140, 150, 200 or more) oligomeric subunits, wherein each subunit comprises an AI surface protein or a fragment thereof. The oligomeric subunits may be covalently associated via a conserved lysine within a pilin motif. The oligomeric subunits may be covalently associated via an LPXTG motif, preferably, via the threonine or serine amino acid residue, respectively.

[0523] AI surface proteins or fragments thereof to be incorporated into the oligomeric, pilus-like structures of the invention will preferably include a pilin motif.

[0524] The oligomeric, pilus like structures may be used alone or in the combinations of the invention. In one embodiment, the invention comprises a GAS Adhesin Island protein in oligomeric form, preferably in a hyperoligomeric form. In one embodiment, the invention comprises a composition comprising one or more GAS Adhesin Island 1 (“GAS AI-1”) proteins and one or more GAS Adhesin Island 2 (“GAS AI-2”), GAS Adhesin Island 3 (“GAS AI-3”), or GAS Adhesin Island 4 (“GAS AI-”) proteins, wherein one or more of the GAS Adhesin Island proteins is in the form of an oligomer, preferably in a hyperoligomeric form.

[0525] In addition to the open reading frames encoding the GAS AI-1 proteins, GAS AI-1 may also include a divergently transcribed transcriptional regulator such as RofA (i.e., the transcriptional regulator is located near or adjacent to the AI protein open reading frames, but it transcribed in the opposite direction).

### GAS Adhesin Island 2

[0526] A second adhesin island, “GAS Adhesin Island 2” or “GAS AI-2” has also been identified in Group A Streptococcus serotypes and isolates. GAS AI-2 comprises a series of approximately eight open reading frames encoding for a collection of amino acid sequences comprising surface proteins and sortases (“GAS AI-2 proteins”). Specifically, GAS AI-2 includes open reading frames encoding for two or more (i.e., 2, 3, 4, 5, 6, 7, or 8) of GAS15, Spy0127, GAS16, GAS17, GAS18, Spy0131, Spy0133, and GAS20.

[0527] A preferred immunogenic composition of the invention comprises a GAS AI-2 surface protein which may be formulated or purified in an oligomeric (pilis) form. In a preferred embodiment, the oligomeric form is a hyperoligomer. Another preferred immunogenic composition of the invention comprises a GAS AI-2 surface protein which has been isolated in an oligomeric (pilis) form. The oligomer or hyperoligomeric pilus structures comprising the GAS AI-2 surface proteins may be purified or otherwise formulate for use in immunogenic compositions.

[0528] One or more of the GAS AI-2 open reading frame polynucleotide sequences may be replaced by a polynucleotide sequence coding for a fragment of the replaced ORF. Alternatively, one or more of the GAS AI-2 open reading frames may be replaced by a sequence having sequence homology to the replaced ORF.

[0529] One or more of the GAS AI-2 surface protein sequences typically include an LPXTG motif (such as LPXTG (SEQ ID NO: 122)) or other sortase substrate motif. The AI surface proteins of the invention may affect the ability of the GAS bacteria to adhere to and invade epithelial cells. AI surface proteins may also affect the ability of GAS to translocate through an epithelial cell layer. Preferably, one or more AI surface proteins are capable of binding to or otherwise associating with an epithelial cell surface. AI surface proteins may also be able to bind to or associate with fibrinogen, fibronectin, or collagen.

[symbol]

the LPXTG containing surface proteins. GAS AI-2 may encode for at least one surface protein. Alternatively, GAS AI-2 may encode for at least two surface exposed proteins and at least one sortase. Preferably, GAS AI-2 encodes for at least three surface exposed proteins and at least two sortases.

[0530] The AI surface proteins may be covalently attached to the bacterial cell wall by membrane-associated transpeptidases, such as an AI sortase. The sortase may function to cleave the surface protein, preferably between the threonine and glycine residues of an LPXRG motif. The sortase may then assist in the formation of an amide link between the threonine carboxyl group and a cell wall precursor such as lipid II. The precursor can then be incorporated into the peptidoglycan via the transglycoslylation and transpeptidation reactions of bacterial wall synthesis. See Comfort et al., Infection & Immunity (2004) 72(5): 2710-2722.

[0531] In one embodiment, the invention includes a composition comprising oligomeric, pilus-like structures comprising an AI surface protein such as GAS15, GAS16, or GAS18. The oligomeric, pilus-like structure may comprise numerous units of AI surface protein. Preferably, the oligomeric, pilus-like structures comprise two or more AI surface proteins. Still more preferably, the oligomeric, pilus-like structure comprises a hyper-oligomeric pilus-like structure comprising at least two (e.g., 2, 3, 4, 5, 6, 7, 8, 9, 10, 11, 12, 13, 14, 15, 20, 25, 30, 35, 40, 45, 50, 60, 70, 80, 90, 100, 120, 140, 150, 200 or more) oligomeric subunits, wherein each subunit comprises an AI surface protein or a fragment thereof. The oligomeric subunits may be covalently associated via a conserved lysine within a pilin motif. The oligomeric subunits may be covalently associated via an LPXTG motif, preferably, via the threonine amino acid residue.

[0532] AI surface proteins or fragments thereof to be incorporated into the oligomeric, pilus-like structures of the invention will preferably include a pilin motif.

[0533] The oligomeric, pilus like structures may be used alone or in the combinations of the invention. In one embodiment, the invention comprises a GAS Adhesin Island protein in oligomeric form, preferably in a hyperoligomeric form. In one embodiment, the invention comprises a composition comprising one or more GAS Adhesin Island 2 (“GAS AI-2”) proteins and one or more GAS Adhesin Island 1 (“GAS AI-1”), GAS Adhesin Island 3 (“GAS AI-3”), or GAS Adhesin Island 4 (“GAS AI-4”) proteins, wherein one or more of the Adhesin Island proteins is in the form of an oligomer, preferably in a hyperoligomeric form.

[0534] In addition to the open reading frames encoding the GAS AI-2 proteins, GAS AI-2 may also include a divergently transcribed transcriptional regulator such as rofA (i.e., the transcriptional regulator is located near or adjacent to the AI protein open reading frames, but it transcribed in the opposite direction).

### GAS Adhesin Island 3

[0535] A third adhesin island, “GAS Adhesin Island 3” or “GAS AI-3” has also been identified in several Group A Streptococcus serotypes and isolates. GAS AI-3 comprises a series of approximately

[symbol]

proteins and sortases (“GAS AI-3 proteins”). Specifically, GAS AI-3 includes open reading frames encoding for two or more (i.e., 2, 3, 4, 5, 6, or 7) of SpyM3_{—}0098, SpyM3_{—}0099, SpyM3_{—}0100, SpyM3_{—}0101, SpyM3_{—}0102, SpyM3_{—}0103, SpyM3_{—}0104, SPs0100, SPs0101, SPs0102, SPs0103, SPs0104, SPs0105, SPs0106, orf78, orf79, orf80, orf81, orf82, orf83, orf84, spyM18_{—}0126, spyM18_{—}0127, spyM18_{—}0128, spyM18_{—}0129, spyM18_{—}0130, spyM18_{—}0131, spyM18_{—}0132, SpyoM01000156, SpyoM01000155, SpyoM01000154, SpyoM01000153, SpyoM01000152, SpyoM01000151, SpyoM01000150, and SpyoM01000149. In one embodiment, GAS AI-3 includes open reading frames encoding for two or more (i.e., 2, 3, 4, 5, 6, or 7) of SpyM3_{—}0098, SpyM3_{—}0099, SpyM3_{—}0100, SpyM3_{—}0101, SpyM3_{—}0102, SpyM3_{—}0103, and SpyM3_{—}0104. In another embodiment, GAS AI-3 includes open reading frames encoding for two or more (i.e., 2, 3, 4, 5, 6, or 7) of SPs0100, SPs0101, SPs0120, SPs0103, SPs0104, SPs0105, and SPs0106. In a further embodiment, GAS AI-3 includes open reading frames encoding for two or more (i.e., 2, 3, 4, 5, 6, or 7) of orf78, orf79, orf80, orf81, orf82, orf83, and orf84. In yet another embodiment, GAS AI-3 includes open reading frames encoding for two or more (i.e., 2, 3, 4, 5, 6, or 7) of spyM18_{—}0126, spyM18_{—}0127, spyM18_{—}0128, spyM18_{—}0129, spyM18_{—}0130, spyM18_{—}0131, and spyM18_{—}0132. In yet another embodiment, GAS AI-3 includes open reading frames encoding for two or more (i.e., 2, 3, 4, 5, 6, or 7) of SpyoM01000156, SpyoM01000155, SpyoM01000154, SpyoM01000153, SpyoM01000152, SpyoM01000151, SpyoM01000150, and SpyoM01000149.

[0536] Applicants have also identified open reading frames encoding fimbrial structural subunits in other GAS bacteria harbouring an AI-3. These open reading frames encode fimbrial structural subunits ISS3040_fimbrial, ISS3776_fimbrial, and ISS4959_fimbrial. A GAS AI-3 may comprise a polynucleotide encoding any one of ISS3040_fimbrial, ISS3776_fimbrial, and ISS4959_fimbrial.

[0537] One or more of the GAS AI-3 open reading frame polynucleotide sequences may be replaced by a polynucleotide sequence coding for a fragment of the replaced ORF. Alternatively, one or more of the GAS AI-3 open reading frames may be replaced by a sequence having sequence homology to the replaced ORF.

[0538] A preferred immunogenic composition of the invention comprises a GAS AI-3 surface protein which may be formulated or purified in an oligomeric (pilis) form. In a preferred embodiment, the oligomeric form is a hyperoligomer. Another preferred immunogenic composition of the invention comprises a GAS AI-3 surface protein which has been isolated in an oligomeric (pilis) form. The oligomer or hyperoligomeric pilus structures comprising the GAS AI-3 surface proteins may be purified or otherwise formulate for use in immunogenic compositions.

[0539] One or more of the GAS AI-3 surface protein sequences typically include an LPXTG motif (such as LPXTG (SEQ ID NO: 122)) or other sortase substrate motif. The AI surface proteins of the invention may affect the ability of the GAS bacteria to adhere to and invade epithelial cells. AI surface proteins may also affect the ability of GAS to translocate through an epithelial cell layer. Preferably, one or more AI surface proteins are capable of binding to or otherwise associating with an epithelial cell surface. AI surface proteins may also be able to bind to or associate with fibrinogen,fibronectin, or collagen.

[0540] The GAS AI-3 sortase proteins are predicted to be involved in the secretion and anchoring of the LPXTG containing surface proteins. GAS AI-3 may encode for at least one surface protein. Alternatively, GAS AI-3 may encode for at least two surface exposed proteins and at least one sortase. Preferably, GAS AI-3 encodes for at least three surface exposed proteins and at least two sortases.

[0541] The AI surface proteins may be covalently attached to the bacterial cell wall by membrane associated transpeptidases, such as an AI sortase. The sortase may function to cleave the surface protein, preferably between the threonine and glycine residues of an LPXTG motif. The sortase may then assist in the formation of an amide link between the threonine or alanine carboxyl group and a cell wall precursor such as lipid II. The precursor can then be incorporated into the peptidoglycan via the transglycoslylation and transpeptidation reactions of bacterial wall synthesis. See Comfort et al., Infection & Immunity (2004) 72(5): 2710-2722.

[0542] The invention includes a composition comprising oligomeric, pilus-like structures comprising an AI surface protein such as SpyM3_{—}0098, SpyM3_{—}0100, SpyM3_{—}0102, SpyM3_{—}0104, SPs0100, SPs0102, SPs0104, SPs0106, orf78, orf80, orf82, orf84, spyM18_{—}0126, spyM18_{—}0128, spyM18_{—}0130, spyM18_{—}0132, SpyoM01000155, SpyoM01000153, SpyoM01000151, SpyoM01000149, ISS3040_fimbrial, ISS3776_fimbrial, and ISS4959_fimbrial. In one embodiment, the invention includes a composition comprising oligomeric, pilus-like structures comprising an AI surface protein such as SpyM3_{—}0098, SpyM3_{—}0100, SpyM3_{—}0102, and SpyM3_{—}0104. In another embodiment, the invention includes a composition comprising oligomeric, pilus-like structures comprising an AI surface protein such as SPs0100, SPs0102, SPs0104, and SPs0106. In another embodiment, the invention includes a composition comprising oligomeric, pilus-like structures comprising an AI surface protein such as orf78, orf80, orf82, and orf84. In yet another embodiment, the invention includes a composition comprising oligomeric, pilus-like structures comprising an AI surface protein such as spyM18_{—}0126, spyM18_{—}0128, spyM18_{—}0130, and spyM18_{—}0132. In a further embodiment, the invention includes a composition comprising oligomeric, pilus-like structures comprising an AI surface protein such as SpyoM01000155, SpyoM01000153, SpyoM01000151, and SpyoM01000149. In yet a further embodiment, the invention includes a composition comprising oligomeric, pilus-like structures comprising an AI surface protein such as ISS3040_fimbrial, ISS3776_fimbrial, and ISS4959_fimbrial. The oligomeric, pilus-like structure may comprise numerous units of AI surface protein. Preferably, the oligomeric, pilus-like structures comprise two or more AI surface proteins. Still more preferably, the oligomeric, pilus-like structure comprises a hyper-oligomeric pilus-like structure comprising at least two (e.g., 2, 3, 4, 5, 6, 7, 8, 9, 10, 11, 12, 13, 14, 15, 20, 25, 30, 35, 40, 45, 50, 60, 70, 80, 90, 100, 120, 140, 150, 200 or more) oligomeric subunits, wherein each subunit comprises an AI surface protein or a fragment thereof. The oligomeric subunits may be covalently associated via a conserved lysine within a pilin motif. The oligomeric subunits may be covalently associated via an LPXTG motif, preferably, via the threonine amino acidresidue.

[0543] AI surface proteins or fragments thereof to be incorporated into the oligomeric, pilus-like structures of the invention will preferably include a pilin motif.

[0544] The oligomeric, pilus like structures may be used alone or in the combinations of the invention. In one embodiment, the invention comprises a GAS Adhesin Island protein in oligomeric form, preferably in a hyperoligomeric form. In one embodiment, the invention comprises a composition comprising one or more GAS Adhesin Island 3 (“GAS AI-3”) proteins and one or more GAS Adhesin Island 1 (“GAS AI-1”), GAS Adhesin Island 2 (“GAS AI-2”), or GAS Adhesin Island 4 (“GAS AI-4”) proteins, wherein one or more of the Adhesin Island proteins is in the form of an oligomer, preferably in a hyperoligomeric form.

[0545] In addition to the open reading frames encoding the GAS AI-3 proteins, GAS AI-3 may also include a transcriptional regulator such as Nra.

### GAS Adhesin Island 4

[0546] A fourth adhesin island, “GAS Adhesin Island 4” or “GAS AI-4” has also been identified in Group A Streptococcus serotypes and isolates. GAS AI-4 comprises a series of approximately eight open reading frames encoding for a collection of amino acid sequences comprising surface proteins and sortases (“GAS AI-4 proteins”). Specifically, GAS AI-4 includes open reading frames encoding for two or more (i.e., 2, 3, 4, 5, 6, 7, or 8) of 19224134, 19224135, 19223136, 19223137, 19224138, 19224139, 19224140, and 19224141.

[0547] Applicants have also identified open reading frames encoding fimbrial structural subunits in other GAS bacteria harbouring an AI-4. These open reading frames encode fimbrial structural subunits 20010296_fimbrial, 20020069_fimbrial, CDC SS 635_fimbrial, ISS4883_fimbrial, and ISS4538_fimbrial. A GAS AI-4 may comprise a polynucleotide encoding any one of 20010296_fimbrial, 20020069_fimbrial, CDC SS 635_fimbrial, ISS4883_fimbrial, and ISS4538_fimbrial.

[0548] One or more of the GAS AI-4 open reading frame polynucleotide sequences may be replaced by a polynucleotide sequence coding for a fragment of the replaced ORF. Alternatively, one or more of the GAS AI-4 open reading frames may be replaced by a sequence having sequence homology to the replaced ORF.

[0549] A preferred immunogenic composition of the invention comprises a GAS AI-4 surface protein which may be formulated or purified in an oligomeric (pilis) form. In a preferred embodiment, the oligomeric form is a hyperoligomer. Another preferred immunogenic composition of the invention comprises a GAS AI-4 surface protein which has been isolated in an oligomeric (pilis) form. The oligomer or hyperoligomeric pilus structures comprising the GAS AI-4 surface proteins may be purified or otherwise formulate for use in immunogenic compositions.

[0550] One or more of the GAS AI-4 surface protein sequences typically include an LPXTG motif (such as LPXTG (SEQ ID NO: 122)) or other sortase substrate motif. The AI surface proteins of the invention may effect the ability of the GAS bacteria to adhere to and invade epithelial cells. AIsurface proteins may also affect the ability of GAS to translocate through an epithelial cell layer. Preferably, one or more AI surface proteins are capable of binding to or otherwise associating with an epithelial cell surface. AI surface proteins may also be able to bind to or associate with fibrinogen, fibronectin, or collagen.

[0551] The GAS AI-4 sortase proteins are predicted to be involved in the secretion and anchoring of the LPXTG containing surface proteins. GAS AI-4 may encode for at least one surface protein. Alternatively, GAS AI-4 may encode for at least two surface exposed proteins and at least one sortase. Preferably, GAS AI-4 encodes for at least three surface exposed proteins and at least two sortases.

[0552] The AI surface proteins may be covalently attached to the bacterial cell wall by membrane-associated transpeptidases, such as an AI sortase. The sortase may function to cleave the surface protein, preferably between the threonine and glycine residues of an LPXTG motif. The sortase may then assist in the formation of an amide link between the threonine carboxyl group and a cell wall precursor such as lipid II. The precursor can then be incorporated into the peptidoglycan via the transglycoslylation and transpeptidation reactions of bacterial wall synthesis. See Comfort et al., Infection & Immunity (2004) 72(5): 2710-2722.

[0553] In one embodiment, the invention includes a composition comprising oligomeric, pilus-like structures comprising an AI surface protein such as 19224134, 19224135, 19224137, 19224139, 19224141, 20010296_fimbrial, 20020069_fimbrial, CDC SS 635_fimbrial, ISS4883_fimbrial, and ISS4538_fimbrial. The oligomeric, pilus-like structure may comprise numerous units of AI surface protein. Preferably, the oligomeric, pilus-like structures comprise two or more AI surface proteins. Still more preferably, the oligomeric, pilus-like structure comprises a hyper-oligomeric pilus-like structure comprising at least two (e.g., 2, 3, 4, 5, 6, 7, 8, 9, 10, 11, 12, 13, 14, 15, 20, 25, 30, 35, 40, 45, 50, 60, 70, 80, 90, 100, 120, 140, 150, 200 or more) oligomeric subunits, wherein each subunit comprises an AI surface protein or a fragment thereof. The oligomeric subunits may be covalently associated via a conserved lysine within a pilin motif. The oligomeric subunits may be covalently associated via an LPXTG motif, preferably, via the threonine amino acid residue.

[0554] AI surface proteins or fragments thereof to be incorporated into the oligomeric, pilus-like structures of the invention will preferably include a pilin motif.

[0555] The oligomeric, pilus like structures may be used alone or in the combinations of the invention. In one embodiment, the invention comprises a GAS Adhesin Island protein in oligomeric form, preferably in a hyperoligomeric form. In one embodiment, the invention comprises a composition comprising one or more GAS Adhesin Island 4 (“GAS AI-4”) proteins and one or more GAS Adhesin Island 1 (“GAS AI-1”), GAS Adhesin Island 2 (“GAS AI-2”), or GAS Adhesin Island 3 (“GAS AI-3”) proteins, wherein one or more of the Adhesin Island proteins is in the form of an oligomer, preferably in a hyperoligomeric form.

[0556] In addition to the open reading frames encoding the GAS AI-4 proteins, GAS AI-4 may alsoinclude a divergently transcribed transcriptional regulator such as rofA (i.e., the transcriptional regulator is located near or adjacent to the AI protein open reading frames, but it transcribed in the opposite direction).

[0557] The oligomeric, pilus-like structures of the invention may be combined with one or more additional GAS proteins. In one embodiment, the oligomeric, pilus-like structures comprise one or more AI surface proteins in combination with a second GAS protein.

[0558] The oligomeric, pilus-like structures may be isolated or purified from bacterial cultures in which the bacteria express an AI surface protein. The invention therefore includes a method for manufacturing an oligomeric AI surface antigen comprising culturing a GAS bacterium that expresses the oligomeric AI protein and isolating the expressed oligomeric AI protein from the GAS bacteria. The AI protein may be collected from secretions into the supernatant or it may be purified from the bacterial surface. The method may further comprise purification of the expressed AI protein. Preferably, the AI protein is in a hyperoligomeric form.

[0559] The oligomeric, pilus-like structures may be isolated or purified from bacterial cultures overexpressing an AI surface protein. The invention therefore includes a method for manufacturing an oligomeric Adhesin Island surface antigen comprising culturing a GAS bacterium adapted for increased AI protein expression and isolation of the expressed oligomeric Adhesin Island protein from the GAS bacteria. The AI protein may be collected from secretions into the supernatant or it may be purified from the bacterial surface. The method may further comprise purification of the expressed Adhesin Island protein. Preferably, the Adhesin Island protein is in a hyperoligomeric form.

[0560] The GAS bacteria are preferably adapted to increase AI protein expression by at least two (e.g., 2, 3, 4, 5, 8, 10, 15, 20, 25, 30, 35, 40, 45, 50, 60, 70, 80, 90, 100, 125, 150 or 200) times wild type expression levels.

[0561] GAS bacteria may be adapted to increase AI protein expression by any means known in the art, including methods of increasing gene dosage and methods of gene upregulation. Such means include, for example, transformation of the GAS bacteria with a plasmid encoding the AI protein. The plasmid may include a strong promoter or it may include multiple copies of the sequence encoding the AI protein. Optionally, the sequence encoding the AI protein within the GAS bacterial genome may be deleted. Alternatively, or in addition, the promoter regulating the GAS Adhesin Island may be modified to increase expression.

[0562] The invention further includes GAS bacteria which have been adapted to produce increased levels of AI surface protein. In particular, the invention includes GAS bacteria which have been adapted to produce oligomeric or hyperoligomeric AI surface protein. In one embodiment, the Gram positive bacteria of the invention are inactivated or attenuated to permit in vivo delivery of the whole bacteria, with the AI surface protein exposed on its surface.

[0563] The invention further includes GAS bacteria which have been adapted to have increased levels of expressed AI protein incorporated in pili on their surface. The GAS bacteria may be adapted to have increased exposure of oligomeric or hyperoligomeric AI proteins on its surface by increasingexpression levels of LepA polypeptide, or an equivalent signal peptidase, in the GAS bacteria Applicants have shown that deletion of LepA in strain SF370 bacteria, which harbour a GAS AI-2, abolishes surface exposure of M and pili proteins on the GAS. Increased levels of LepA expression in GAS are expected to result in increased exposure of M and pili proteins on the surface of GAS. Increased expression of LepA in GAS may be achieved by any means known in the art, such as increasing gene dosage and methods of gene upregulation. The GAS bacteria adapted to have increased levels of LepA expression may additionally be adapted to express increased levels of at least one pili protein.

[0564] Alternatively, the AI proteins of the invention may be expressed on the surface of a non-pathogenic Gram positive bacteria, such as Streptococcus gordonii (See, e.g., Byrd et al., “Biological consequences of antigen and cytokine co-expression by recombinant Streptococcus gordonii vaccine vectors”, Vaccine (2002) 20:2197-2205) or Lactococcus lactis (See, e.g., Mannam et al., “Mucosal Vaccine Made from Live, Recombinant Lactococcus lactis Protects Mice against Pharangeal Infection with Streptococcus pyogenes” Infection and Immunity (2004) 72(6):3444-3450). As used herein, non-pathogenic Gram positive bacteria refer to Gram positive bacteria which are compatible with a human host subject and are not associated with human pathogenesis. Preferably, the non-pathogenic bacteria are modified to express the AI surface protein in oligomeric, or hyper-oligomeric form. Sequences encoding for an AI surface protein and, optionally, an AI sortase, may be integrated into the non-pathogenic Gram positive bacterial genome or inserted into a plasmid. The non-pathogenic Gram positive bacteria may be inactivated or attenuated to facilitate in vivo delivery of the whole bacteria, with the AI surface protein exposed on its surface. Alternatively, the AI surface protein may be isolated or purified from a bacterial culture of the non-pathogenic Gram positive bacteria. For example, the AI surface protein may be isolated from cell extracts or culture supernatants. Alternatively, the AI surface protein may be isolated or purified from the surface of the non-pathogenic Gram positive bacteria.

[0565] The non-pathogenic Gram positive bacteria may be used to express any of the GAS Adhesin Island proteins described herein. The non-pathogenic Gram positive bacteria are transformed to express an Adhesin Island surface protein. Preferably, the non-pathogenic Gram positive bacteria also express at least one Adhesin Island sortase. The AI transformed non-pathogenic Gram positive bacteria of the invention may be used to prevent or treat infection with pathogenic GAS.

[0566] Applicants modified L. lactis to demonstrate that, like GBS polypeptides, it can express GAS AI polypeptides. L. lactis was transformed with pAM401 constructs encoding entire pili gene clusters of AI-1, AI-2, and AI-4 adhesin islands. Briefly, the pAM401 is a promoterless high-copy plasmid. The entire pili gene clusters of an M6 (AI-1), M1 (AI-2), and M12 (AI-4) bacteria were inserted into the pAM401 construct. The gene clusters were transcribed under the control their own (M6, M1, or M12) promoter or the GBS promoter that successfully initiated expression of the GBS AI-1 adhesin islands in L. lactis, described above. FIG. 172 provides a schematic depiction of GAS M6 (AI-1),

[symbol]

inserted in the pAM401 construct.

[0567] Each of the L. lactic transformed with one of the M6, M1, or M12 adhesin island gene clusters expressed high molecular weight structures that were immunoreactive with antibodies that bind to polypeptides present in their respective pili. FIGS. 173 A-C provide results of Western blot analysis of surface protein-enriched extracts of L. lactis transformed with M6 (FIG. 173 A), M1 FIG. 173 B), or M12 (FIG. 173 C) adhesin island gene clusters using antibodies that bind to the fimbrial structural subunit encoded by each cluster. FIG. 173A at lanes 3 and 4 shows detection of high molecular structures in L. lactis transformed with an adhesin island pilus gene cluster from an M1 AI-2 using an antibody that binds to fimbrial structural subunit Spy0128. FIG. 173B at lanes 3 and 4 shows detection of high molecular weight structures in L. lactis transformed with an adhesin island pilus gene cluster from an M12 AI-4 using an antibody that binds to fimbrial structural subunit EftLSL.A. FIG. 173C at lane 3 shows detection of high molecular weight structures in L. lactis transformed with an adhesin island pilus gene cluster from an M6 AI-1 using an antibody that binds to fimbrial structural subunit M6_Spy0160. In FIGS. 173 A-C, “p1” immediately following the notation of AI subtype indicates that the promoter present in the Adhesin Island is used to drive transcription of the adhesin island gene cluster and “p2” indicates that the promoter was the GBS promoter described above. Thus, it appears that L. lactis is capable of expressing the fimbrial structural subunits encoded by GAS adhesin islands in an oligomeric form.

[0568] Alternatively, the oligomeric, pilus-like structures may be produced recombinantly. If produced in a recombinant host cell system, the AI surface protein will preferably be expressed in coordination with the expression of one or more of the AI sortases of the invention. Such AI sortases will facilitate oligomeric or hyperoligomeric formation of the AI surface protein subunits.

S. pneumoniae from TIGR4 Adhesin Island

[0569] As discussed above, Applicants have identified adhesin islands within the genome of S. pneumoniae from TIGR4. The S. pneumoniae from TIGR4 Adhesin Island comprises a series of approximately seven open reading frames encoding for a collection of amino acid sequences comprising surface proteins and sortases. Specifically, the S. pneumoniae from TIGR4 AI proteins includes open reading frames encoding for two or more (i.e., 2, 3, 4, 5, 6, or 7) of SP0462, SP0463, SP0464, SP0465, SP0466, SP0467, and SP0468.

[0570] A preferred immunogenic composition of the invention comprises a S. pneumoniae from TIGR4 AI surface protein which may be formulated or purified in an oligomeric (pilis) form. In a preferred embodiment, the oligomeric form is a hyperoligomer. Another preferred immunogenic composition of the invention comprises a S. pneumoniae from TIGR4 AI surface protein which has been isolated in an oligomeric (pilis) form. The oligomer or hyperoligomer pilus structures comprising S. pneumoniae surface proteins may be purified or otherwise formulated for use in immunogenic compositions.

[symbol]

sequences may be replaced by a polynucleotide sequence coding for a fragment of the replaced ORF. Alternatively, one or more of the S. pneumoniae from TIGR4 AI open reading frames may be replaced by a sequence having sequence homology to the replaced ORF.

[0571] One or more of the S. pneumoniae from TIGR4 AI surface protein sequences typically include an LPXTG motif (such as LPXTG (SEQ ID NO: 122)) or other sortase substrate motif.

[0572] The S. pneumoniae from TIGR4 AI surface proteins of the invention may affect the ability of the S. pneumoniae bacteria to adhere to and invade epithelial cells. AI surface proteins may also affect the ability of S. pneumoniae to translocate through an epithelial cell layer. Preferably, one or more S. pneumoniae from TIGR4 AI surface proteins are capable of binding to or otherwise associating with an epithelial cell surface. S. pneumoniae from TIGR4 AI surface proteins may also be able to bind to or associate with fibrinogen, fibronectin, or collagen.

[0573] The S. pneumoniae from TIGR4 AI sortase proteins are predicted to be involved in the secretion and anchoring of the LPXTG containing surface proteins. S. pneumoniae from TIGR4 AI may encode for at least one surface protein. Alternatively, S. pneumoniae from TIGR4 AI may encode for at least two surface exposed proteins and at least one sortase. Preferably, S. pneumoniae from TIGR4 AI encodes for at least three surface exposed proteins and at least two sortases.

[0574] The AI surface proteins may be covalently attached to the bacterial cell wall by membrane-associated transpeptidases, such as an AI sortase. The sortase may function to cleave the surface protein, preferably between the threonine and glycine residues of an LPXTG motif. The sortase may then assist in the formation of an amide link between the threonine carboxyl group and a cell wall precursor such as lipid II. The precursor can then be incorporated into the peptidoglycan via the transglycoslylation and transpeptidation reactions of bacterial wall synthesis. See Comfort et al., Infection & Immunity (2004) 72(5): 2710-2722.

[0575] In one embodiment, the invention includes a composition comprising oligomeric, pilus-like structures comprising a S. pneumoniae from TIGR4 AI surface protein such as SP0462, SP0463, SP0464, or SP0465. The oligomeric, pilus-like structure may comprise numerous units of AI surface protein. Preferably, the oligomeric, pilus-like structures comprise two or more AI surface proteins. Still more preferably, the oligomeric, pilus-like structure comprises a hyper-oligomeric pilus-like structure comprising at least two (e.g., 2, 3, 4, 5, 6, 7, 8, 9, 10, 11, 12, 13, 14, 15, 20, 25, 30, 35, 40, 45, 50, 60, 70, 80, 90, 100, 120, 140, 150, 200 or more) oligomeric subunits, wherein each subunit comprises an AI surface protein or a fragment thereof. The oligomeric subunits may be covalently associated via a conserved lysine within a pilin motif. The oligomeric subunits may be covalently associated via an LPXTG motif, preferably, via the threonine or serine amino acid residue, respectively.

[0576] AI surface proteins or fragments thereof to be incorporated into the oligomeric, pilus-like structures of the invention will preferably include a pilin motif.

[symbol]

invention. In one embodiment, the invention comprises a S. pneumoniae from TIGR4 AI protein in oligomeric form, preferably in a hyperoligomeric form. In one embodiment, the invention comprises a composition comprising one or more S. pneumoniae from TIGR4 AI proteins and one or more S. pneumoniae strain 670 AI proteins, wherein one or more of the S. pneumoniae AI proteins is in the form of an oligomer, preferably in a hyperoligomeric form.

[0577] In addition to the open reading frames encoding the S. pneumoniae from TIGR4 AI proteins, S. pneumoniae from TIGR4 AI may also include a transcriptional regulator.

S. pneumoniae Strain 670 Adhesin Island

[0578] As discussed above, Applicants have identified adhesin islands within the genome of S. pneumoniae strain 670. The S. pneumoniae strain 670 Adhesin Island comprises a series of approximately seven open reading frames encoding for a collection of amino acid sequences comprising surface proteins and sortases. Specifically, the S. pneumoniae strain 670 AI proteins includes open reading frames encoding for two or more (i.e., 2, 3, 4, 5, 6, or 7) of orf1_{—}670, orf3_{—}670, orf4_{—}670, orf5_{—}670, orf6_{—}670, orf7_{—}670, orf8_{—}670.

[0579] A preferred immunogenic composition of the invention comprises a S. pneumoniae strain 670 AI surface protein which may be formulated or purified in an oligomeric (pilis) form. Another preferred immunogenic composition of the invention comprises a S. pneumoniae strain 670 AI surface protein which has been isolated in an oligomeric (pilis) form.

[0580] One or more of the S. pneumoniae strain 670 AI open reading frame polynucleotide sequences may be replaced by a polynucleotide sequence coding for a fragment of the replaced ORF. Alternatively, one or more of the S. pneumoniae strain 670 AI open reading frames may be replaced by a sequence having sequence homology to the replaced ORF.

[0581] One or more of the S. pneumoniae strain 670 AI surface protein sequences typically include an LPXTG motif (such as LPXTG (SEQ ID NO: 122)) or other sortase substrate motif.

[0582] The S. pneumoniae strain 670 AI surface proteins of the invention may affect the ability of the S. pneumoniae bacteria to adhere to and invade epithelial cells. AI surface proteins may also affect the ability of S. pneumoniae to translocate through an epithelial cell layer. Preferably, one or more S. pneumoniae strain 670 AI surface proteins are capable of binding to or otherwise associating with an epithelial cell surface. S. pneumoniae strain 670 AI surface proteins may also be able to bind to or associate with fibrinogen, fibronectin, or collagen.

[0583] The S. pneumoniae strain 670 AI sortase proteins are predicted to be involved in the secretion and anchoring of the LPXTG containing surface proteins. S. pneumoniae strain 670 AI may encode for at least one surface protein. Alternatively, S. pneumoniae strain 670 AI may encode for at least two surface exposed proteins and at least one sortase. Preferably, S. pneumoniae strain 670 AI encodes for at least three surface exposed proteins and at least two sortases.

[0584] The AI surface proteins may be covalently attached to the bacterial cell wall by membrane-associated transpeptidases, such as an AI sortase. The sortase may function to cleave the surface

[symbol]

then assist in the formation of an amide link between the threonine carboxyl group and a cell wall precursor such as lipid II. The precursor can then be incorporated into the peptidoglycan via the transglycoslylation and transpeptidation reactions of bacterial wall synthesis. See Comfort et al., Infection & Immunity (2004) 72(5): 2710-2722.

[0585] In one embodiment, the invention includes a composition comprising oligomeric, pilus-like structures comprising a S. pneumoniae strain 670 AI surface protein such as orf3_{—}670, orf4_{—}670, or orf5_{—}670. The oligomeric, pilus-like structure may comprise numerous units of AI surface protein. Preferably, the oligomeric, pilus-like structures comprise two or more AI surface proteins. Still more preferably, the oligomeric, pilus-like structure comprises a hyper-oligomeric pilus-like structure comprising at least two (e.g., 2, 3, 4, 5, 6, 7, 8, 9, 10, 11, 12, 13, 14, 15, 20, 25, 30, 35, 40, 45, 50, 60, 70, 80, 90, 100, 120, 140, 150, 200 or more) oligomeric subunits, wherein each subunit comprises an AI surface protein or a fragment thereof. The oligomeric subunits may be covalently associated via a conserved lysine within a pilin motif. The oligomeric subunits may be covalently associated via an LPXTG motif, preferably, via the threonine or serine amino acid residue, respectively.

[0586] AI surface proteins or fragments thereof to be incorporated into the oligomeric, pilus-like structures of the invention will preferably include a pilin motif.

[0587] The oligomeric, pilus like structures may be used alone or in the combinations of the invention. In one embodiment, the invention comprises a S. pneumoniae strain 670 AI protein in oligomeric form, preferably in a hyperoligomeric form. In one embodiment, the invention comprises a composition comprising one or more S. pneumoniae strain 670 AI proteins and one or more S. pneumoniae from TIGR4 AI proteins, wherein one or more of the S. pneumoniae AI proteins is in the form of an oligomer, preferably in a hyperoligomeric form.

[0588] In addition to the open reading frames encoding the S. pneumoniae strain 670 AI proteins, S. pneumoniae strain 670 AI may also include a transcriptional regulator.

S. pneumoniae Strain 14 CSR 10 Adhesin Island

[0589] As discussed above, Applicants have identified adhesin islands within the genome of S. pneumoniae strain 14 CSR 10. The S. pneumoniae strain 14 CSR 10 Adhesin Island comprises a series of approximately seven open reading frames encoding for a collection of amino acid sequences comprising surface proteins and sortases. Specifically, the S. pneumoniae strain 14 CSR 10 AI proteins includes open reading frames encoding for two or more (i.e., 2, 3, 4, 5, 6, or 7) of ORF2_{—}14CSR, ORF3_{—}14CSR, ORF4_{—}14CSR, ORF5_{—}14CSR, ORF6_{—}14CSR, ORF7_{—}14CSR, ORF8_{—}14CSR.

[0590] A preferred immunogenic composition of the invention comprises a S. pneumoniae strain 14 CSR 10 AI surface protein which may be formulated or purified in an oligomeric (pilis) form. Another preferred immunogenic composition of the invention comprises a S. pneumoniae strain 14 CSR 10 AI surface protein which has been isolated in an oligomeric (pilis) form.

[symbol]

sequences may be replaced by a polynucleotide sequence coding for a fragment of the replaced ORF. Alternatively, one or more of the S. pneumoniae strain 14 CSR 10 AI open reading frames may be replaced by a sequence having sequence homology to the replaced ORF.

[0591] One or more of the S. pneumoniae strain 14 CSR 10 AI surface protein sequences typically include an LPXTG motif (such as LPXTG (SEQ ID NO: 122)) or other sortase substrate motif.

[0592] The S. pneumoniae strain 14 CSR 10 AI surface proteins of the invention may affect the ability of the S. pneumoniae bacteria to adhere to and invade epithelial cells. AI surface proteins may also affect the ability of S. pneumoniae to translocate through an epithelial cell layer. Preferably, one or more S. pneumoniae strain 14 CSR 10 AI surface proteins are capable of binding to or otherwise associating with an epithelial cell surface. S. pneumoniae strain 14 CSR 10 AI surface proteins may also be able to bind to or associate with fibrinogen, fibronectin, or collagen.

[0593] The S. pneumoniae strain 14 CSR 10 AI sortase proteins are predicted to be involved in the secretion and anchoring of the LPXTG containing surface proteins. S. pneumoniae strain 14 CSR 10 AI may encode for at least one surface protein. Alternatively, S. pneumoniae strain 14 CSR 10 AI may encode for at least two surface exposed proteins and at least one sortase. Preferably, S. pneumoniae strain 14 CSR 10 AI encodes for at least three surface exposed proteins and at least two sortases.

[0594] The AI surface proteins may be covalently attached to the bacterial cell wall by membrane-associated transpeptidases, such as an AI sortase. The sortase may function to cleave the surface protein, preferably between the threonine and glycine residues of an LPXRG motif. The sortase may then assist in the formation of an amide link between the threonine carboxyl group and a cell wall precursor such as lipid II. The precursor can then be incorporated into the peptidoglycan via the transglycoslylation and transpeptidation reactions of bacterial wall synthesis. See Comfort et al., Infection & Immunity (2004) 72(5): 2710-2722.

[0595] In one embodiment, the invention includes a composition comprising oligomeric, pilus-like structures comprising a S. pneumoniae strain 14 CSR 10 AI surface protein such as orf3_CSR, orf4_CSR, or orf5_CSR. The oligomeric, pilus-like structure may comprise numerous units of AI surface protein. Preferably, the oligomeric, pilus-like structures comprise two or more AI surface proteins. Still more preferably, the oligomeric, pilus-like structure comprises a hyper-oligomeric pilus-like structure comprising at least two (e.g., 2, 3, 4, 5, 6, 7, 8, 9, 10, 11, 12, 13, 14, 15, 20, 25, 30, 35, 40, 45, 50, 60, 70, 80, 90, 100, 120, 140, 150, 200 or more) oligomeric subunits, wherein each subunit comprises an AI surface protein or a fragment thereof. The oligomeric subunits may be covalently associated via a conserved lysine within a pilin motif. The oligomeric subunits may be covalently associated via an LPXRG motif, preferably, via the threonine or serine amino acid residue, respectively.

[0596] AI surface proteins or fragments thereof to be incorporated into the oligomeric, pilus-like structures of the invention will preferably include a pilin motif.

[symbol]

invention. In one embodiment, the invention comprises a S. pneumoniae strain 14 CSR 10 AI protein in oligomeric form, preferably in a hyperoligomeric form. In one embodiment, the invention comprises a composition comprising one or more S. pneumoniae strain 14 CSR 10 AI proteins, and one or more AI proteins of any of S. pneumoniae from TIGR4, 670, 19A Hungary 6, 6B Finland 12, 6B Spain 2, 9V Spain 3, 19F Taiwan 14, 23F Taiwan 15, or 23F Poland 16, wherein one or more of the S. pneumoniae AI proteins is in the form of an oligomer, preferably in a hyperoligomeric form.

[0597] In addition to the open reading frames encoding the S. pneumoniae strain 14 CSR 10AI proteins, S. pneumoniae strain 14 CSR 10 AI may also include a transcriptional regulator.

S. pneumoniae Strain 19A Hungary 6 Adhesin Island

[0598] As discussed above, Applicants have identified adhesin islands within the genome of S. pneumoniae strain 19A Hungary 6. The S. pneumoniae strain 19A Hungary 6 Adhesin Island comprises a series of approximately seven open reading frames encoding for a collection of amino acid sequences comprising surface proteins and sortases. Specifically, the S. pneumoniae strain 19A Hungary 6 AI proteins includes open reading frames encoding for two or more (i.e., 2, 3, 4, 5, 6, or 7) of ORF2_{—}19AH, ORF3_{—}19AH, ORF4_{—}19AH, ORF5_{—}19AH, ORF6_{—}19AH, ORF7_{—}19AH, ORF8_{—}19AH.

[0599] A preferred immunogenic composition of the invention comprises a S. pneumoniae strain 19A Hungary 6 AI surface protein which may be formulated or purified in an oligomeric (pilis) form. Another preferred immunogenic composition of the invention comprises a S. pneumoniae strain 19A Hungary 6 AI surface protein which has been isolated in an oligomeric (pilis) form.

[0600] One or more of the S. pneumoniae strain 19A Hungary 6 AI open reading frame polynucleotide sequences may be replaced by a polynucleotide sequence coding for a fragment of the replaced ORF. Alternatively, one or more of the S. pneumoniae strain 19A Hungary 6 AI open reading frames may be replaced by a sequence having sequence homology to the replaced ORF.

[0601] One or more of the S. pneumoniae strain 19A Hungary 6 AI surface protein sequences typically include an LPXTG motif (such as LPXTG (SEQ ID NO: 122)) or other sortase substrate motif.

[0602] The S. pneumoniae strain 19A Hungary 6 AI surface proteins of the invention may affect the ability of the S. pneumoniae bacteria to adhere to and invade epithelial cells. AI surface proteins may also affect the ability of S. pneumoniae to translocate through an epithelial cell layer. Preferably, one or more S. pneumoniae strain 19A Hungary 6 AI surface proteins are capable of binding to or otherwise associating with an epithelial cell surface. S. pneumoniae strain 19A Hungary 6 AI surface proteins may also be able to bind to or associate with fibrinogen, fibronectin, or collagen.

[0603] The S. pneumoniae strain 19A Hungary 6 AI sortase proteins are predicted to be involved in the secretion and anchoring of the LPXTG containing surface proteins. S. pneumoniae strain 19A Hungary 6 AI may encode for at least one surface protein. Alternatively, S. pneumoniae strain 19A Hungary 6 AI may encode for at least two surface exposed proteins and at least one sortase.

[symbol]

proteins and at least two sortases.

[0604] The AI surface proteins may be covalently attached to the bacterial cell wall by membrane-associated transpeptidases, such as an AI sortase. The sortase may function to cleave the surface protein, preferably between the threonine and glycine residues of an LPXTG motif. The sortase may then assist in the formation of an amide link between the threonine carboxyl group and a cell wall precursor such as lipid II. The precursor can then be incorporated into the peptidoglycan via the transglycoslylation and transpeptidation reactions of bacterial wall synthesis. See Comfort et al., Infection & Immunity (2004) 72(5): 2710-2722.

[0605] In one embodiment, the invention includes a composition comprising oligomeric, pilus-like structures comprising a S. pneumoniae strain 19A Hungary 6 AI surface protein such as orf3_{—}19AH, orf4_{—}19AH, or orf5_{—}19AH. The oligomeric, pilus-like structure may comprise numerous units of AI surface protein. Preferably, the oligomeric, pilus-like structures comprise two or more AI surface proteins. Still more preferably, the oligomeric, pilus-like structure comprises a hyper-oligomeric pilus-like structure comprising at least two (e.g., 2, 3, 4, 5, 6, 7, 8, 9, 10, 11, 12, 13, 14, 15, 20, 25, 30, 35, 40, 45, 50, 60, 70, 80, 90, 100, 120, 140, 150, 200 or more) oligomeric subunits, wherein each subunit comprises an AI surface protein or a fragment thereof. The oligomeric subunits may be covalently associated via a conserved lysine within a pilin motif. The oligomeric subunits may be covalently associated via an LPXTG motif, preferably, via the threonine or serine amino acid residue, respectively.

[0606] AI surface proteins or fragments thereof to be incorporated into the oligomeric, pilus-like structures of the invention will preferably include a pilin motif.

[0607] The oligomeric, pilus like structures may be used alone or in the combinations of the invention. In one embodiment, the invention comprises a S. pneumoniae strain 19A Hungary 6 AI protein in oligomeric form, preferably in a hyperoligomeric form. In one embodiment, the invention comprises a composition comprising one or more S. pneumoniae strain 19A Hungary 6 AI proteins and one or more AI proteins from one of any one of S. pneumoniae from TIGR4, 670, 14 CSR 10, 6B Finland 12, 6B Spain 2, 9V Spain 3, 19F Taiwan 14, 23F Taiwan 15, or 23F Poland 16 AI GR4 AI proteins, wherein one or more of the S. pneumoniae AI proteins is in the form of an oligomer, preferably in a hyperoligomeric form.

[0608] In addition to the open reading frames encoding the S. pneumoniae strain 19A Hungary 6 AI proteins, S. pneumoniae strain 19A Hungary 6 AI may also include a transcriptional regulator.

S. pneumoniae Strain 19F Taiwan 14 Adhesin Island

[0609] As discussed above, Applicants have identified adhesin islands within the genome of S. pneumoniae strain 19F Taiwan 14. The S. pneumoniae strain 19F Taiwan 14 Adhesin Island comprises a series of approximately seven open reading frames encoding for a collection of amino acid sequences comprising surface proteins and sortases. Specifically, the S. pneumoniae strain 19F Taiwan 14 AI proteins includes open reading frames encoding for two or more (i.e., 2, 3, 4, 5, 6, or 7)

[symbol]

### ORF8_{—}19FTW.

[0610] A preferred immunogenic composition of the invention comprises a S. pneumoniae strain 19F Taiwan 14 AI surface protein which may be formulated or purified in an oligomeric (pilis) form. Another preferred immunogenic composition of the invention comprises a S. pneumoniae strain 19F Taiwan 14 AI surface protein which has been isolated in an oligomeric (pilis) form.

[0611] One or more of the S. pneumoniae strain 19F Taiwan 14 AI open reading frame polynucleotide sequences may be replaced by a polynucleotide sequence coding for a fragment of the replaced ORF. Alternatively, one or more of the S. pneumoniae strain 19F Taiwan 14 AI open reading frames may be replaced by a sequence having sequence homology to the replaced ORF.

[0612] One or more of the S. pneumoniae strain 19F Taiwan 14 AI surface protein sequences typically include an LPXTG motif (such as LPXTG (SEQ ID NO: 122)) or other sortase substrate motif.

[0613] The S. pneumoniae strain 19F Taiwan 14 AI surface proteins of the invention may affect the ability of the S. pneumoniae bacteria to adhere to and invade epithelial cells. AI surface proteins may also affect the ability of S. pneumoniae to translocate through an epithelial cell layer. Preferably, one or more S. pneumoniae strain 19F Taiwan 14 AI surface proteins are capable of binding to or otherwise associating with an epithelial cell surface. S. pneumoniae strain 19F Taiwan 14 AI surface proteins may also be able to bind to or associate with fibrinogen, fibronectin, or collagen.

[0614] The S. pneumoniae strain 19F Taiwan 14 AI sortase proteins are predicted to be involved in the secretion and anchoring of the LPXTG containing surface proteins. S. pneumoniae strain 19F Taiwan 14 AI may encode for at least one surface protein. Alternatively, S. pneumoniae strain 19F Taiwan 14 AI may encode for at least two surface exposed proteins and at least one sortase. Preferably, S. pneumoniae strain 19F Taiwan 14 AI encodes for at least three surface exposed proteins and at least two sortases.

[0615] The AI surface proteins may be covalently attached to the bacterial cell wall by membrane-associated transpeptidases, such as an AI sortase. The sortase may function to cleave the surface protein, preferably between the threonine and glycine residues of an LPXTG motif. The sortase may then assist in the formation of an amide link between the threonine carboxyl group and a cell wall precursor such as lipid II. The precursor can then be incorporated into the peptidoglycan via the transglycoslylation and transpeptidation reactions of bacterial wall synthesis. See Comfort et al., Infection & Immunity (2004) 72(5): 2710-2722.

[0616] In one embodiment, the invention includes a composition comprising oligomeric, pilus-like structures comprising a S. pneumoniae strain 19F Taiwan 14 AI surface protein such as orf3_{—}19FTW, orf4_{—}19FTW, or orf5_{—}19FTW. The oligomeric, pilus-like structure may comprise numerous units of AI surface protein. Preferably, the oligomeric, pilus-like structures comprise two or more AI surface proteins. Still more preferably, the oligomeric, pilus-like structure comprises a hyper-oligomeric pilus-like structure comprising at least two (e.g., 2, 3, 4, 5, 6, 7, 8, 9, 10, 11, 12, 13, 14, 15, 20, 25, 30,

[symbol]

subunit comprises an AI surface protein or a fragment thereof. The oligomeric subunits may be covalently associated via a conserved lysine within a pilin motif. The oligomeric subunits may be covalently associated via an LPXTG motif, preferably, via the threonine or serine amino acid residue, respectively.

[0617] AI surface proteins or fragments thereof to be incorporated into the oligomeric, pilus-like structures of the invention will preferably include a pilin motif.

[0618] The oligomeric, pilus like structures may be used alone or in the combinations of the invention. In one embodiment, the invention comprises a S. pneumoniae strain 19F Taiwan 14 AI protein in oligomeric form, preferably in a hyperoligomeric form. In one embodiment, the invention comprises a composition comprising one or more S. pneumoniae strain 19F Taiwan 14 AI proteins and one or more AI proteins of any one or more of S. pneumoniae from TIGR4, 670, 19A Hungary 6, 6B Finland 12, 6B Spain 2, 9V Spain 3, 14 CSR 10, 23F Taiwan 15, or 23F Poland 16, wherein one or more of the S. pneumoniae AI proteins is in the form of an oligomer, preferably in a hyperoligomeric form.

[0619] In addition to the open reading frames encoding the S. pneumoniae strain 19F Taiwan 14 AI proteins, S. pneumoniae strain 19F Taiwan 14 AI may also include a transcriptional regulator.

S. pneumoniae Strain 23F Poland 16 Adhesin Island

[0620] As discussed above, Applicants have identified adhesin islands within the genome of S. pneumoniae strain 23F Poland 16. The S. pneumoniae strain 23F Poland 16 Adhesin Island comprises a series of approximately seven open reading frames encoding for a collection of amino acid sequences comprising surface proteins and sortases. Specifically, the S. pneumoniae strain 23F Poland 16 AI proteins includes open reading frames encoding for two or more (i.e., 2, 3, 4, 5, 6, or 7) of ORF2_{—}23FP, ORF3_{—}23FP, ORF4_{—}23FP, ORF5_{—}23FP, ORF6_{—}23FP, ORF7_{—}23FP, and ORF8_{—}23FP.

[0621] A preferred immunogenic composition of the invention comprises a S. pneumoniae strain 23F Poland 16 AI surface protein which may be formulated or purified in an oligomeric (pilis) form. Another preferred immunogenic composition of the invention comprises a S. pneumoniae strain 23F Poland 16 AI surface protein which has been isolated in an oligomeric (pilis) form.

[0622] One or more of the S. pneumoniae strain 23F Poland 16 AI open reading frame polynucleotide sequences may be replaced by a polynucleotide sequence coding for a fragment of the replaced ORF. Alternatively, one or more of the S. pneumoniae strain 23F Poland 16 AI open reading frames may be replaced by a sequence having sequence homology to the replaced ORF.

[0623] One or more of the S. pneumoniae strain 23F Poland 16 AI surface protein sequences typically include an LPXTG motif (such as LPXTG (SEQ ID NO; 122)) or other sortase substrate motif.

[0624] The S. pneumoniae strain 23F Poland 16 AI surface proteins of the invention may affect the ability of the S. pneumoniae bacteria to adhere to and invade epithelial cells. AI surface proteins may

[symbol]

or more S. pneumoniae strain 23F Poland 16 AI surface proteins are capable of binding to or otherwise associating with an epithelial cell surface. S. pneumoniae strain 23F Poland 16 AI surface proteins may also be able to bind to or associate with fibrinogen, fibronectin, or collagen.

[0625] The S. pneumoniae strain 23F Poland 16 AI sortase proteins are predicted to be involved in the secretion and anchoring of the LPXTG containing surface proteins. S. pneumoniae strain 23F Poland 16 AI may encode for at least one surface protein. Alternatively, S. pneumoniae strain 23F Poland 16 AI may encode for at least two surface exposed proteins and at least one sortase. Preferably, S. pneumoniae strain 23F Poland 16 AI encodes for at least three surface exposed proteins and at least two sortases.

[0626] The AI surface proteins may be covalently attached to the bacterial cell wall by membrane-associated transpeptidases, such as an AI sortase. The sortase may function to cleave the surface protein, preferably between the threonine and glycine residues of an LPXTG motif. The sortase may then assist in the formation of an amide link between the threonine carboxyl group and a cell wall precursor such as lipid II. The precursor can then be incorporated into the peptidoglycan via the transglycoslylation and transpeptidation reactions of bacterial wall synthesis. See Comfort et al., Infection & Immunity (2004) 72(5): 2710-2722.

[0627] In one embodiment, the invention includes a composition comprising oligomeric, pilus-like structures comprising a S. pneumoniae strain 23F Poland 16 AI surface protein such as orf3_{—}23FP, orf4_{—}23FP, or orf5_{—}23FP. The oligomeric, pilus-like structure may comprise numerous units of AI surface protein. Preferably, the oligomeric, pilus-like structures comprise two or more AI surface proteins. Still more preferably, the oligomeric, pilus-like structure comprises a hyper-oligomeric pilus-like structure comprising at least two (e.g., 2, 3, 4, 5, 6, 7, 8, 9, 10, 11, 12, 13, 14, 15, 20, 25, 30, 35, 40, 45, 50, 60, 70, 80, 90, 100, 120, 140, 150, 200 or more) oligomeric subunits, wherein each subunit comprises an AI surface protein or a fragment thereof. The oligomeric subunits may be covalently associated via a conserved lysine within a pilin motif. The oligomeric subunits may be covalently associated via an LPXTG motif, preferably, via the threonine or serine amino acid residue, respectively.

[0628] AI surface proteins or fragments thereof to be incorporated into the oligomeric, pilus-like structures of the invention will preferably include a pilin motif.

[0629] The oligomeric, pilus like structures may be used alone or in the combinations of the invention. In one embodiment, the invention comprises a S. pneumoniae strain 23F Poland 16 AI protein in oligomeric form, preferably in a hyperoligomeric form. In one embodiment, the invention comprises a composition comprising one or more S. pneumoniae strain 23F Poland 16 AI proteins and one or more AI proteins from any one or more S. pneumoniae strains of TIGR4, 670, 19A Hungary 6, 6B Finland 12, 6B Spain 2, 9V Spain 3, 19F Taiwan 14, 23F Taiwan 15, or 14 CSR 10, wherein one or more of the S. pneumoniae AI proteins is in the form of an oligomer, preferably in a hyperoligomeric form.

[symbol]

proteins, S. pneumoniae strain 23F Poland 16 AI may also include a transcriptional regulator.
S. pneumoniae Strain 23F Taiwan 15 Adhesin Island

[0630] As discussed above, Applicants have identified adhesin islands within the genome of S. pneumoniae strain 23F Taiwan 15. The S. pneumoniae strain 23F Taiwan 15 Adhesin Island comprises a series of approximately seven open reading frames encoding for a collection of amino acid sequences comprising surface proteins and sortases. Specifically, the S. pneumoniae strain 23F Taiwan 15 AI proteins includes open reading frames encoding for two or more (i.e., 2, 3, 4, 5, 6, or 7) of ORF2_{—}23FTW, ORF3_{—}23FTW, ORF4_{—}23FTW, ORF5_{—}23FTW, ORF6_{—}23FTW, ORF7_{—}23FTW, ORF8_{—}23FTW.

[0631] A preferred immunogenic composition of the invention comprises a S. pneumoniae strain 23F Taiwan 15 AI surface protein which may be formulated or purified in an oligomeric (pilis) form. Another preferred immunogenic composition of the invention comprises a S. pneumoniae strain 23F Taiwan 15 AI surface protein which has been isolated in an oligomeric (pilis) form.

[0632] One or more of the S. pneumoniae strain 23F Taiwan 15 AI open reading frame polynucleotide sequences may be replaced by a polynucleotide sequence coding for a fragment of the replaced ORF. Alternatively, one or more of the S. pneumoniae strain 23F Taiwan 15 AI open reading frames may be replaced by a sequence having sequence homology to the replaced ORF.

[0633] One or more of the S. pneumoniae strain 23F Taiwan 15 AI surface protein sequences typically include an LPXTG motif (such as LPXTG (SEQ ID NO: 122)) or other sortase substrate motif.

[0634] The S. pneumoniae strain 23F Taiwan 15 AI surface proteins of the invention may affect the ability of the S. pneumoniae bacteria to adhere to and invade epithelial cells. AI surface proteins may also affect the ability of S. pneumoniae to translocate through an epithelial cell layer. Preferably, one or more S. pneumoniae strain 23F Taiwan 15 AI surface proteins are capable of binding to or otherwise associating with an epithelial cell surface. S. pneumoniae strain 23F Taiwan 15 AI surface proteins may also be able to bind to or associate with fibrinogen, fibronectin, or collagen.

[0635] The S. pneumoniae strain 23F Taiwan 15 AI sortase proteins are predicted to be involved in the secretion and anchoring of the LPXTG containing surface proteins. S. pneumoniae strain 23F Taiwan 15 AI may encode for at least one surface protein. Alternatively, S. pneumoniae strain 23F Taiwan 15 AI may encode for at least two surface exposed proteins and at least one sortase. Preferably, S. pneumoniae strain 23F Taiwan 15 AI encodes for at least three surface exposed proteins and at least two sortases.

[0636] The AI surface proteins may be covalently attached to the bacterial cell wall by membrane-associated transpeptidases, such as an AI sortase. The sortase may function to cleave the surface protein, preferably between the threonine and glycine residues of an LPXTG motif. The sortase may then assist in the formation of an amide link between the threonine carboxyl group and a cell wall precursor such as lipid II. The precursor can then be incorporated into the peptidoglycan via the

[symbol]

### Infection & Immunity (2004) 72(5): 2710-2722.

[0637] In one embodiment, the invention includes a composition comprising oligomeric, pilus-like structures comprising a S. pneumoniae strain 23F Taiwan 15 AI surface protein such as orf3_{—}23FTW, orf4_{—}23FTW, or orf5_{—}23FTW. The oligomeric, pilus-like structure may comprise numerous units of AI surface protein. Preferably, the oligomeric, pilus-like structures comprise two or more AI surface proteins. Still more preferably, the oligomeric, pilus-like structure comprises a hyper-oligomeric pilus-like structure comprising at least two (e.g., 2, 3, 4, 5, 6, 7, 8, 9, 10, 11, 12, 13, 14, 15, 20, 25, 30, 35, 40, 45, 50, 60, 70, 80, 90, 100, 120, 140, 150, 200 or more) oligomeric subunits, wherein each subunit comprises an AI surface protein or a fragment thereof. The oligomeric subunits may be covalently associated via a conserved lysine within a pilin motif. The oligomeric subunits may be covalently associated via an LPXTG motif, preferably, via the threonine or serine amino acid residue, respectively.

[0638] AI surface proteins or fragments thereof to be incorporated into the oligomeric, pilus-like structures of the invention will preferably include a pilin motif.

[0639] The oligomeric, pilus like structures may be used alone or in the combinations of the invention. In one embodiment, the invention comprises a S. pneumoniae strain 23F Taiwan 15 AI protein in oligomeric form, preferably in a hyperoligomeric form. In one embodiment, the invention comprises a composition comprising one or more S. pneumoniae strain 23F Taiwan 15 AI proteins and one or more AI proteins from any one or more of S. pneumoniae from TIGR4, 670, 19A Hungary 6, 6B Finland 12, 6B Spain 2, 9V Spain 3, 19F Taiwan 14, 14 CSR 10, or 23F Poland 16 AI, wherein one or more of the S. pneumoniae AI proteins is in the form of an oligomer, preferably in a hyperoligomeric form.

[0640] In addition to the open reading frames encoding the S. pneumoniae strain 23F Taiwan 15 AI proteins, S. pneumoniae strain 23F Taiwan 15 AI may also include a transcriptional regulator.

S. pneumoniae Strain 6B Finland 12 Adhesin Island

[0641] As discussed above, Applicants have identified adhesin islands within the genome of S. pneumoniae strain 6B Finland 12. The S. pneumoniae strain 6B Finland 12 Adhesin Island comprises a series of approximately seven open reading frames encoding for a collection of amino acid sequences comprising surface proteins and sortases. Specifically, the S. pneumoniae strain 6B Finland 12 AI proteins includes open reading frames encoding for two or more (i.e., 2, 3, 4, 5, 6, or 7) of ORF2_{—}6BF, ORF3_{—}6BF, ORF4_{—}6BF, ORF5_{—}6BF, ORF6_{—}6BF, ORF7_{—}6BF, ORF8_{—}6BF.

[0642] A preferred immunogenic composition of the invention comprises a S. pneumoniae strain 6B Finland 12 AI surface protein which may be formulated or purified in an oligomeric (pilis) form. Another preferred immunogenic composition of the invention comprises a S. pneumoniae strain 6B Finland 12 AI surface protein which has been isolated in an oligomeric (pilis) form.

[0643] One or more of the S. pneumoniae strain 6B Finland 12 AI open reading frame polynucleotide sequences may be replaced by a polynucleotide sequence coding for a fragment of the replaced ORF.

[symbol]

replaced by a sequence having sequence homology to the replaced ORF.

[0644] One or more of the S. pneumoniae strain 6B Finland 12 AI surface protein sequences typically include an LPXTG motif (such as LPXTG (SEQ ID NO: 122)) or other sortase substrate motif.

[0645] The S. pneumoniae strain 6B Finland 12 AI surface proteins of the invention may affect the ability of the S. pneumoniae bacteria to adhere to and invade epithelial cells. AI surface proteins may also affect the ability of S. pneumoniae to translocate through an epithelial cell layer. Preferably, one or more S. pneumoniae strain 6B Finland 12 AI surface proteins are capable of binding to or otherwise associating with an epithelial cell surface. S. pneumoniae strain 6B Finland 12 AI surface proteins may also be able to bind to or associate with fibrinogen, fibronectin, or collagen.

[0646] The S. pneumoniae strain 6B Finland 12 AI sortase proteins are predicted to be involved in the secretion and anchoring of the LPXTG containing surface proteins. S. pneumoniae strain 6B Finland 12 AI may encode for at least one surface protein. Alternatively, S. pneumoniae strain 6B Finland 12 AI may encode for at least two surface exposed proteins and at least one sortase. Preferably, S. pneumoniae strain 6B Finland 12 AI encodes for at least three surface exposed proteins and at least two sortases.

[0647] The AI surface proteins may be covalently attached to the bacterial cell wall by membrane-associated transpeptidases, such as an AI sortase. The sortase may function to cleave the surface protein, preferably between the threonine and glycine residues of an LPXTG motif. The sortase may then assist in the formation of an amide link between the threonine carboxyl group and a cell wall precursor such as lipid II. The precursor can then be incorporated into the peptidoglycan via the transglycoslylation and transpeptidation reactions of bacterial wall synthesis. See Comfort et al., Infection & Immunity (2004) 72(5): 2710-2722.

[0648] In one embodiment, the invention includes a composition comprising oligomeric, pilus-like structures comprising a S. pneumoniae strain 6B Finland 12 AI surface protein such as orf3_{—}6BF, orf4_{—}6BF, or orf5_{—}6BF. The oligomeric, pilus-like structure may comprise numerous units of AI surface protein. Preferably, the oligomeric, pilus-like structures comprise two or more AI surface proteins. Still more preferably, the oligomeric, pilus-like structure comprises a hyper-oligomeric pilus-like structure comprising at least two (e.g., 2, 3, 4, 5, 6, 7, 8, 9, 10, 11, 12, 13, 14, 15, 20, 25, 30, 35, 40, 45, 50, 60, 70, 80, 90, 100, 120, 140, 150, 200 or more) oligomeric subunits, wherein each subunit comprises an AI surface protein or a fragment thereof. The oligomeric subunits may be covalently associated via a conserved lysine within a pilin motif. The oligomeric subunits may be covalently associated via an LPXTG motif, preferably, via the threonine or serine amino acid residue, respectively.

[0649] AI surface proteins or fragments thereof to be incorporated into the oligomeric, pilus-like structures of the invention will preferably include a pilin motif.

[symbol]

invention. In one embodiment, the invention comprises a S. pneumoniae strain 6B Finland 12 AI protein in oligomeric form, preferably in a hyperoligomeric form. In one embodiment, the invention comprises a composition comprising one or more S. pneumoniae strain 6B Finland 12 AI proteins and one or more AI proteins of any one or more of S. pneumoniae from TIGR4, 670, 19A Hungary 6, 6B Finland 12, 6B Spain 2, 9V Spain 3, 19F Taiwan 14, 23F Taiwan 15, or 23F Poland 16 AI, wherein one or more of the S. pneumoniae AI proteins is in the form of an oligomer, preferably in a hyperoligomeric form.

[0650] In addition to the open reading frames encoding the S. pneumoniae strain 6B Finland 12 AI proteins, S. pneumoniae strain 6B Finland 12 AI may also include a transcriptional regulator.

S. pneumoniae Strain 6B Spain 2 Adhesin Island

[0651] As discussed above, Applicants have identified adhesin islands within the genome of S. pneumoniae strain 6B Spain 2. The S. pneumoniae strain 6B Spain 2 Adhesin Island comprises a series of approximately seven open reading frames encoding for a collection of amino acid sequences comprising surface proteins and sortases. Specifically, the S. pneumoniae strain 6B Spain 2 AI proteins includes open reading frames encoding for two or more (i.e., 2, 3, 4, 5, 6, or 7) of ORF2_{—}6BSP, ORF3_{—}6BSP, ORF4_{—}6BSP, ORF5_{—}6BSP, ORF6_{—}6BSP, ORF7_{—}6BSP, and ORF8_{—}6BSP.

[0652] A preferred immunogenic composition of the invention comprises a S. pneumoniae strain 6B Spain 2 AI surface protein which may be formulated or purified in an oligomeric (pilis) form. Another preferred immunogenic composition of the invention comprises a S. pneumoniae strain 6B Spain 2 AI surface protein which has been isolated in an oligomeric (pilis) form.

[0653] One or more of the S. pneumoniae strain 6B Spain 2 AI open reading frame polynucleotide sequences may be replaced by a polynucleotide sequence coding for a fragment of the replaced ORF. Alternatively, one or more of the S. pneumoniae strain 6B Spain 2 AI open reading frames may be replaced by a sequence having sequence homology to the replaced ORF.

[0654] One or more of the S. pneumoniae strain 6B Spain 2 AI surface protein sequences typically include an LPXTG motif (such as LPXTG (SEQ ID NO: 122)) or other sortase substrate motif.

[0655] The S. pneumoniae strain 6B Spain 2 AI surface proteins of the invention may affect the ability of the S. pneumoniae bacteria to adhere to and invade epithelial cells. AI surface proteins may also affect the ability of S. pneumoniae to translocate through an epithelial cell layer. Preferably, one or more S. pneumoniae strain 6B Spain 2 AI surface proteins are capable of binding to or otherwise associating with an epithelial cell surface. S. pneumoniae strain 6B Spain 2 AI surface proteins may also be able to bind to or associate with fibrinogen, fibronectin, or collagen.

[0656] The S. pneumoniae strain 6B Spain 2 AI sortase proteins are predicted to be involved in the secretion and anchoring of the LPXTG containing surface proteins. S. pneumoniae strain 6B Spain 2 AI may encode for at least one surface protein. Alternatively, S. pneumoniae strain 6B Spain 2 AI may encode for at least two surface exposed proteins and at least one sortase. Preferably, S.

[symbol]

sortases.

[0657] The AI surface proteins may be covalently attached to the bacterial cell wall by membrane-associated transpeptidases, such as an AI sortase. The sortase may function to cleave the surface protein, preferably between the threonine and glycine residues of an LPXTG motif. The sortase may then assist in the formation of an amide link between the threonine carboxyl group and a cell wall precursor such as lipid II. The precursor can then be incorporated into the peptidoglycan via the transglycoslylation and transpeptidation reactions of bacterial wall synthesis. See Comfort et al., Infection & Immunity (2004) 72(5): 2710-2722.

[0658] In one embodiment, the invention includes a composition comprising oligomeric, pilus-like structures comprising a S. pneumoniae strain 6B Spain 2 AI surface protein such as orf3_{—}6BSP, orf4_{—}6BSP, or orf5_{—}6BSP. The oligomeric, pilus-like structure may comprise numerous units of AI surface protein. Preferably, the oligomeric, pilus-like structures comprise two or more AI surface proteins. Still more preferably, the oligomeric, pilus-like structure comprises a hyper-oligomeric pilus-like structure comprising at least two (e.g., 2, 3, 4, 5, 6, 7, 8, 9, 10, 11, 12, 13, 14, 15, 20, 25, 30, 35, 40, 45, 50, 60, 70, 80, 90, 100, 120, 140, 150, 200 or more) oligomeric subunits, wherein each subunit comprises an AI surface protein or a fragment thereof. The oligomeric subunits may be covalently associated via a conserved lysine within a pilin motif. The oligomeric subunits may be covalently associated via an LPXTG motif, preferably, via the threonine or serine amino acid residue, respectively.

[0659] AI surface proteins or fragments thereof to be incorporated into the oligomeric, pilus-like structures of the invention will preferably include a pilin motif.

[0660] The oligomeric, pilus like structures may be used alone or in the combinations of the invention. In one embodiment, the invention comprises a S. pneumoniae strain 6B Spain 2 AI protein in oligomeric form, preferably in a hyperoligomeric form. In one embodiment, the invention comprises a composition comprising one or more S. pneumoniae strain 6B Spain 2 AI proteins and one or more AI proteins of any one or more of S. pneumoniae from TIGR4, 670, 19A Hungary 6, 6B Finland 12, 14 CSR 10, 9V Spain 3, 19F Taiwan 14, 23F Taiwan 15, or 23F Poland 16 AI, wherein one or more of the S. pneumoniae AI proteins is in the form of an oligomer, preferably in a hyperoligomeric form.

[0661] In addition to the open reading frames encoding the S. pneumoniae strain 6B Spain 2 AI proteins, S. pneumoniae strain 6B Spain 2 AI may also include a transcriptional regulator.

S. pneumoniae Strain 9V Spain 3 Adhesin Island

[0662] As discussed above, Applicants have identified adhesin islands within the genome of S. pneumoniae strain 9V Spain 3. The S. pneumoniae strain 9V Spain 3 Adhesin Island comprises a series of approximately seven open reading frames encoding for a collection of amino acid sequences comprising surface proteins and sortases. Specifically, the S. pneumoniae strain 9V Spain 3 AI proteins includes open reading frames encoding for two or more (i.e., 2, 3, 4, 5, 6, or 7) of ORF2_{—}9VSP, ORF3_{—}9VSP, ORF4_{—}9VSP, ORF5_{—}9VSP, ORF6_{—}9VSP, ORF7_{—}9VSP, and ORF8_{—}9VSP.

[0663] A preferred immunogenic composition of the invention comprises a S. pneumoniae strain 9V Spain 3 AI surface protein which may be formulated or purified in an oligomeric (pilis) form. Another preferred immunogenic composition of the invention comprises a S. pneumoniae strain 9V Spain 3 AI surface protein which has been isolated in an oligomeric (pilis) form.

[0664] One or more of the S. pneumoniae strain 9V Spain 3 AI open reading frame polynucleotide sequences may be replaced by a polynucleotide sequence coding for a fragment of the replaced ORF. Alternatively, one or more of the S. pneumoniae strain 9V Spain 3 AI open reading frames may be replaced by a sequence having sequence homology to the replaced ORF.

[0665] One or more of the S. pneumoniae strain 9V Spain 3 AI surface protein sequences typically include an LPXTG motif (such as LPXTG (SEQ ID NO: 122)) or other sortase substrate motif.

[0666] The S. pneumoniae strain 9V Spain 3 AI surface proteins of the invention may affect the ability of the S. pneumoniae bacteria to adhere to and invade epithelial cells. AI surface proteins may also affect the ability of S. pneumoniae to translocate through an epithelial cell layer. Preferably, one or more S. pneumoniae strain 9V Spain 3 AI surface proteins are capable of binding to or otherwise associating with an epithelial cell surface. S. pneumoniae strain 9V Spain 3 AI surface proteins may also be able to bind to or associate with fibrinogen, fibronectin, or collagen.

[0667] The S. pneumoniae strain 9V Spain 3 AI sortase proteins are predicted to be involved in the secretion and anchoring of the LPXTG containing surface proteins. S. pneumoniae strain 9V Spain 3 AI may encode for at least one surface protein. Alternatively, S. pneumoniae strain 9V Spain 3 AI may encode for at least two surface exposed proteins and at least one sortase. Preferably, S. pneumoniae strain 9V Spain 3 AI encodes for at least three surface exposed proteins and at least two sortases.

[0668] The AI surface proteins may be covalently attached to the bacterial cell wall by membrane-associated transpeptidases, such as an AI sortase. The sortase may function to cleave the surface protein, preferably between the threonine and glycine residues of an LPXTG motif. The sortase may then assist in the formation of an amide link between the threonine carboxyl group and a cell wall precursor such as lipid II. The precursor can then be incorporated into the peptidoglycan via the transglycoslylation and transpeptidation reactions of bacterial wall synthesis. See Comfort et al., Infection & Immunity (2004) 72(5): 2710-2722.

[0669] In one embodiment, the invention includes a composition comprising oligomeric, pilus-like structures comprising a S. pneumoniae strain 9V Spain 3 AI surface protein such as orf3_{—}9VSP, orf4_{—}9VSP, or orf5_{—}9VSP. The oligomeric, pilus-like structure may comprise numerous units of AI surface protein. Preferably, the oligomeric, pilus-like structures comprise two or more AI surface proteins. Still more preferably, the oligomeric, pilus-like structure comprises a hyper-oligomeric pilus-like structure comprising at least two (e.g., 2, 3, 4, 5, 6, 7, 8, 9, 10, 11, 12, 13, 14, 15, 20, 25, 30, 35, 40, 45, 50, 60, 70, 80, 90, 100, 120, 140, 150, 200 or more) oligomeric subunits, wherein each subunit comprises an AI surface protein or a fragment thereof. The oligomeric subunits may be covalently associated via a conserved lysine within a pilin motif. The oligomeric subunits may be covalently associated via an LPXTG motif, preferably, via the threonine or serine amino acid residue, respectively.

[0670] AI surface proteins or fragments thereof to be incorporated into the oligomeric, pilus-like structures of the invention will preferably include a pilin motif.

[0671] The oligomeric, pilus like structures may be used alone or in the combinations of the invention. In one embodiment, the invention comprises a S. pneumoniae strain 9V Spain 3 AI protein in oligomeric form, preferably in a hyperoligomeric form. In one embodiment, the invention comprises a composition comprising one or more S. pneumoniae strain 9V Spain 3 AI proteins and one or more AI proteins from any one or more of S. pneumoniae from TIGR4, 670, 19A Hungary 6, 6B Finland 12, 6B Spain 2, 14 CSR 10, 19F Taiwan 14, 23F Taiwan 15, or 23F Poland 16 AI, wherein one or more of the S. pneumoniae AI proteins is in the form of an oligomer, preferably in a hyperoligomeric form.

[0672] In addition to the open reading frames encoding the S. pneumoniae strain 9V Spain 3 AI proteins, S. pneumoniae strain 9V Spain 3 AI may also include a transcriptional regulator.

[0673] The S. pneumoniae oligomeric, pilus-like structures may be isolated or purified from bacterial cultures in which the bacteria express an S. pneumoniae AI surface protein. The invention therefore includes a method for manufacturing an oligomeric AI surface antigen comprising culturing a S. pneumoniae bacterium that expresses the oligomeric AI protein and isolating the expressed oligomeric AI protein from the S. pneumoniae bacteria. The AI protein may be collected from secretions into the supernatant or it may be purified from the bacterial surface. The method may further comprise purification of the expressed AI protein. Preferably, the AI protein is in a hyperoligomeric form.

[0674] The oligomeric, pilus-like structures may be isolated or purified from bacterial cultures overexpressing an AI surface protein. The invention therefore includes a method for manufacturing an S. pneumoniae oligomeric Adhesin Island surface antigen comprising culturing a S. pneumoniae bacterium adapted for increased AI protein expression and isolation of the expressed oligomeric Adhesin Island protein from the S. pneumoniae bacteria. The AI protein may be collected from secretions into the supernatant or it may be purified from the bacterial surface. The method may further comprise purification of the expressed Adhesin Island protein. Preferably, the Adhesin Island protein is in a hyperoligomeric form.

[0675] The S. pneumoniae bacteria are preferably adapted to increase AI protein expression by at least two (e.g., 2, 3, 4, 5, 8, 10, 15, 20, 25, 30, 35, 40, 45, 50, 60, 70, 80, 90, 100, 125, 150 or 200) times wild type expression levels.

[0676] S. pneumoniae bacteria may be adapted to increase AI protein expression by any means known in the art, including methods of increasing gene dosage and methods of gene upregulation. Such means include, for example, transformation of the S. pneumoniae bacteria with a plasmid encoding the AI protein. The plasmid may include a strong promoter or it may include multiple copies of the sequence encoding the AI protein. Optionally, the sequence encoding the AI protein within the S. pneumoniae bacterial genome may be deleted. Alternatively, or in addition, the promoter regulating the S. pneumoniae Adhesin Island may be modified to increase expression.

[0677] The invention further includes S. pneumoniae bacteria which have been adapted to produce increased levels of AI surface protein. In particular, the invention includes S. pneumoniae bacteria which have been adapted to produce oligomeric or hyperoligomeric AI surface protein. In one embodiment, the S. pneumoniae of the invention are inactivated or attenuated to permit in vivo delivery of the whole bacteria, with the AI surface protein exposed on its surface.

[0678] The invention further includes S. pneumoniae bacteria which have been adapted to have increased levels of expressed AI protein incorporated in pili on their surface. The S. pneumoniae bacteria may be adapted to have increased exposure of oligomeric or hyperoligomeric AI proteins on its surface by increasing expression levels of a signal peptidase polypeptide. Increased levels of a local signal peptidase expression in Gram positive bacteria (such as LepA in GAS) are expected to result in increased exposure of pili proteins on the surface of Gram positive bacteria. Increased expression of a leader peptidase in S. pneumoniae may be achieved by any means known in the art, such as increasing gene dosage and methods of gene upregulation. The S. pneumoniae bacteria adapted to have increased levels of leader peptidase may additionally be adapted to express increased levels of at least one pili protein.

[0679] Alternatively, the AI proteins of the invention may be expressed on the surface of a non-pathogenic Gram positive bacteria, such as Streptococcus gordonii (See, e.g., Byrd et al., “Biological consequences of antigen and cytokine co-expression by recombinant Streptococcus gordonii vaccine vectors”, Vaccine (2002) 20:2197-2205) or Lactococcus lactis (See, e.g., Mannam et al., “Mucosal Vaccine Made from Live, Recombinant Lactococcus lactis Protects Mice against Pharangeal Infection with Streptococcus pyogenes” Infection and Immunity (2004) 72(6):3444-3450). As used herein, non-pathogenic Gram positive bacteria refer to Gram positive bacteria which are compatible with a human host subject and are not associated with human pathogenesis. Preferably, the non-pathogenic bacteria are modified to express the AI surface protein in oligomeric, or hyper-oligomeric form. Sequences encoding for an AI surface protein and, optionally, an AI sortase, may be integrated into the non-pathogenic Gram positive bacterial genome or inserted into a plasmid. The non-pathogenic Gram positive bacteria may be inactivated or attenuated to facilitate in vivo delivery of the whole bacteria, with the AI surface protein exposed on its surface. Alternatively, the AI surface protein may be isolated or purified from a bacterial culture of the non-pathogenic Gram positive bacteria. For example, the AI surface protein may be isolated from cell extracts or culture supernatants. Alternatively, the AI surface protein may be isolated or purified from the surface of the non-pathogenic Gram positive bacteria.

[0680] The non-pathogenic Gram positive bacteria may be used to express any of the S. pneumoniae Adhesin Island proteins described herein. The non-pathogenic Gram positive bacteria are transformed to express an Adhesin Island surface protein. Preferable, the non-pathogenic Gram positive bacteria also express at least one Adhesin Island sortase. The AI transformed non-pathogenic Gram positive bacteria of the invention may be used to prevent or treat infection with pathogenic S. pneumoniae.

[0681] FIGS. 190 A and B, and 193-195 provide examples of three methods successfully practiced by applicants to purify pili from S. pneumoniae TIGR4.

### Immunogenic Compositions

[0682] The Gram positive bacteria AI proteins described herein are useful in immunogenic compositions for the prevention or treatment of Gram positive bacterial infection. For example, the GBS AI surface proteins described herein are useful in immunogenic compositions for the prevention or treatment of GBS infection. As another example, the GAS AI surface proteins described herein may be useful in immunogenic compositions for the prevention or treatment of GAS infection. As another example, the S. pneumoniae AI surface proteins may be useful in immunogenic compositions for the prevention or treatment of S. pneumoniae infection.

[0683] Gram positive bacteria AI surface proteins that can provide protection across more than one serotype or strain isolate may be used to increase immunogenic effectiveness. For example, a particular GBS AI surface protein having an amino acid sequence that is at least 50% (i.e., at least 55%, 60%, 65%, 70%, 75%, 80%, 85%, 90%, 95%, 96%, 97%, 98%, 99%, or 100%) homologous to the particular GBS AI surface protein of at least 2 (i.e., at least 3, 4, 5, 6, 7, 8, 9, 10, or more) other GBS serotypes or strain isolates may be used to increase the effectiveness of such compositions.

[0684] As another example, fragments of Gram positive bacteria AI surface proteins that can provide protection across more than one serotype or strain isolate may be used to increase immunogenic effectiveness. Such a fragment may be identified within a consensus sequence of a full length amino acid sequence of a Gram positive bacteria AI surface protein. Such a fragment can be identified in the consensus sequence by its high degree of homology or identity across multiple (i.e., at least 3, 4, 5, 6, 7, 8, 9, 10, or more) Gram positive bacteria serotypes or strain isolates. Preferably, a high degree of homology is a degree of homology of at least 90% (i.e., at least 90%, 91%, 92%, 93%, 94%, 95%, 96%, 97%, 98%, 99%, or 100%) across Gram positive bacteria serotypes or strain isolates. Preferably, a high degree of identity is a degree of identity of at least 90% (i.e., at least 90%, 91%, 92%, 93%, 94%, 95%, 96%, 97%, 98%, 99%, or 100%) across Gram positive bacteria serotypes or strain isolates. In one embodiment of the invention, such a fragment of a Gram positive bacteria AI surface protein may be used in the immunogenic compositions.

[0685] In addition, the AI surface protein oligomeric pilus structures may be formulated or purified for use in immunization. Isolated AI surface protein oligomeric pilus structures may also be used for immunization.

[0686] The invention includes an immunogenic composition comprising a first Gram positive bacteria AI protein and a second Gram positive bacterial AI protein. One or more of the AI proteins

[symbol]

substrate motif.

[0687] The first and second AI proteins may be from the same or different genus or species of Gram positive bacteria. If within the same species, the first and second AI proteins may be from the same or different AI subtypes. If two AIs are of the same subtype, the AIs have the same numerical designation. For example, all AIs designated as AI-1 are of the same AI subtype. If two AIs are of a different subtype, the AIs have different numerical designations. For example, AI-1 is of a different AI subtype from AI-2, AI-3, AI-4, etc. Likewise, AI-2 is of a different AI subtype from AI-1, AI-3, and AI-4, etc.

[0688] For example, the invention includes an immunogenic composition comprising one or more GBS AI-1 proteins and one or more GBS AI-2 proteins. One or more of the AI proteins may be a surface protein. Such surface proteins may contain an LPXTG motif (such as LPXTG (SEQ ID NO: 122)) and may bind fibrinogen, fibronectin, or collagen. One or more of the AI proteins may be a sortase. The GBS AI-1 proteins may be selected from the group consisting of GBS 80, GBS 104, GBS 52, SAG0647 and SAG0648. Preferably, the GBS AI-1 proteins include GBS 80 or GBS 104.

[0689] The GBS AI-2 proteins may be selected from the group consisting of GBS 67, GBS 59, GBS 150, SAG1405, SAG1406, 01520, 01521, 01522, 01523, 01523, 01524 and 01525. In one embodiment, the GBS AI-2 proteins are selected from the group consisting of GBS 67, GBS 59, GBS 150, SAG1405, and SAG1406. In another embodiment, the GBS AI-2 proteins may be selected from the group consisting of 01520, 01521, 01522, 01523, 01523, 01524 and 01525. Preferably, the GBS AI-2 protein includes GBS 59 or GBS 67.

[0690] As another example, the invention includes an immunogenic composition comprising one or more of any combination of GAS AI-1, GAS AI-2, GAS AI-3, or GAS AI-4 proteins. One or more of the GAS AI proteins may be a sortase. The GAS AI-1 proteins may be selected from the group consisting of M6_Spy0156, M6_Spy0157, M6_Spy0158, M6_Spy0159, M6_Spy0160, M6_Spy0161, CDC SS 410_fimbrial, ISS3650_fimbrial, and DSM2071_fimbrial. Preferably, the GAS AI-1 proteins are selected from the group consisting of M6_Spy0157, M6_Spy0159, M6_Spy0160, CDC SS 410_fimbrial, ISS3650_fimbrial, and DSM2071_fimbrial.

[0691] The GAS AI-2 proteins may be selected from the group consisting of Spy0124, GAS15, Spy0127, GAS16, GAS17, GAS18, Spy0131, Spy0133, and GAS20. Preferably, the GAS AI-2 proteins are selected from the group consisting of GAS15, GAS16, and GAS18.

[0692] The GAS AI-3 proteins may be selected from the group consisting of SpyM3_{—}0097, SpyM3_{—}0098, SpyM3_{—}0099, SpyM3_{—}0100, SpyM3_{—}0101, SpyM3_{—}0102, SpyM3_{—}0103, SpyM3_{—}0104, SPs0099, SPs0100, SPs0101, SPs0102, SPs0103, SPs0104, SPs0105, SPs0106, orf77, orf78, orf79, orf80, orf81, orf82, orf83, orf84, spyM18_{—}0125, spyM18_{—}0126, spyM18_{—}0127, spyM18_{—}0128, spyM18_{—}0129, spyM18_{—}0130, spyM18_{—}0131, spyM18_{—}0132, SpyoM01000156, SpyoM01000155, SpyoM01000154, SpyoM01000153, SpyoM01000152, SpyoM01000151, SpyoM01000150, SpyoM01000149, ISS3040_fimbrial, ISS3776_fimbrial, and ISS4959_fimbrial. In one embodiment the GAS AI-3 proteins are selected from the group consisting of SpyM3_{—}0097, SpyM3_{—}0098, SpyM3_{—}0099, SpyM3_{—}0100, SpyM3_{—}0101, SpyM3_{—}0102, SpyM3_{—}0103, and SpyM3_{—}0104. In another embodiment, the GAS AI-3 proteins are selected from the group consisting of SPs0099, SPs0100, SPs0101, SPs0102, SPs0103, SPs0104, SPs0105, and SPs0106. In yet another embodiment, the GAS AI-3 proteins are selected from the group consisting of orf77, orf78, orf79, orf80, orf81, orf82, orf83, and orf84. In a further embodiment, the GAS AI-3 proteins are selected from the group consisting of spyM18_{—}0125, spyM18_{—}0126, spyM18_{—}0127, spyM18_{—}0128, spyM18_{—}0129, spyM18_{—}0130, spyM18_{—}0131, and spyM18_{—}0132. In yet another embodiment the GAS AI-3 proteins are selected from the group consisting of SpyoM01000156, SpyoM01000155, SpyoM01000154, SpyoM01000153, SpyoM01000152, SpyoM01000151, SpyoM01000150, and SpyoM01000149.

[0693] The GAS AI-4 proteins may be selected from the group consisting of 19224133, 19224134, 19224135, 19224136, 19224137, 19224138, 19224139, 19224140, 19224141, 20010296_fimbrial, 20020069_fimbrial, CDC SS 635_fimbrial, ISS4883_fimbrial, and ISS4538_fimbrial. Preferably, the GAS-AI-4 proteins are selected from the group consisting of 19224134, 19224135, 19224137, 19224139, 19224141, 20010296_fimbrial, 20020069_fimbrial, CDC SS 635_fimbrial, ISS4883_fimbrial, and ISS4538_fimbrial.

[0694] As yet another example, the invention includes an immunogenic composition comprising one or more of any combination of S. pneumonaie from TIGR4, S. pneumonaie strain 670, S. pneumonaie from 19A Hungary 6, S. pneumonaie from 6B Finland 12, S. pneumonaie from 6B Spain 2, S. pneumonaie from 9V Spain 3, S. pneumonaie from 14 CSR 10, S. pneumonaie from 19F Taiwan 14, S. pneumonaie from 23F Taiwan 15, or S. pneumonaie from 23F Poland 16 AI proteins. One or more of the AI proteins may be a surface protein. Such surface proteins may contain an LPXTG motif (such as LPXTG (SEQ ID NO: 122)) and may bind fibrinogen, fibronectin, or collagen. One or more of the AI proteins may be a sortase.

[0695] The S. pneumonaie from TIGR4 AI proteins may be selected from the group consisting of SP0462, SP0463, SP0464, SP0465, SP0466, SP0467, SP0468. Preferably, the S. pneumonaie from TIGR4 AI proteins include SP0462, SP0463, or SP0464.

[0696] The S. pneumonaie strain 670 AI proteins may be selected from the group consisting of Orf1_{—}670, Orf3_{—}670, Orf4_{—}670, Orf5_{—}670, Orf6_{—}670, Orf7_{—}670, and Orf8_{—}670. Preferably, the S. pneumonaie strain 670 AI proteins include Orf3_{—}670, Orf4_{—}670, or Orf5_{—}670.

[0697] The S. pneumonaie from 19A Hungary 6 AI proteins may be selected from the group consisting of ORF2_{—}19AH, ORF3_{—}19AH, ORF4_{—}19AH, ORF5_{—}19AH, ORF6_{—}19AH, ORF7_{—}19AH, or ORF8_{—}19AH.

[0698] The S. pneumonaie from 6B Finland 12 AI proteins may be selected from the group consisting of ORF2_{—}6BF, ORF3_{—}6BF, ORF4_{—}6BF, ORF5_{—}6BF, ORF6_{—}6BF, ORF7_{—}6BF, or ORF8_{—}6BF.

[0699] The S. pneumonaie from 6B Spain 2 AI proteins may be selected from the group consisting of ORF2_{—}6BSP, ORF3_{—}6BSP, ORF4_{—}6BSP, ORF5_{—}6BSP, ORF6_{—}6BSP, ORF7_{—}6BSP, or ORF8_{—}6BSP.

[0700] The S. pneumonaie from 9V Spain 3 AI proteins may be selected from the group consisting of ORF2_{—}9VSP, ORF3_{—}9VSP, ORF4_{—}9VSP, ORF5_{—}9VSP, ORF6_{—}9VSP, ORF7_{—}9VSP, or ORF8_{—}9VSP.

[0701] The S. pneumonaie from 14 CSR 10 AI proteins may be selected from the group consisting of ORF2_{—}14CSR, ORF3_{—}14CSR, ORF4_{—}14CSR, ORF5_{—}14CSR, ORF6_{—}14CSR, ORF7_{—}14CSR, or ORF8_{—}14CSR.

[0702] The S. pneumonaie from 19F Taiwan 14 AI proteins may be selected from the group consisting of ORF2_{—}19FTW, ORF3_{—}19FTW, ORF4_{—}19FTW, ORF5_{—}19FTW, ORF6_{—}19FTW, ORF7_{—}19FTW, or ORF8_{—}19FTW.

[0703] The S. pneumonaie from 23F Taiwan 15 AI proteins may be selected from the group consisting of ORF2_{—}23FTW, ORF3_{—}23FTW, ORF4_{—}23FTW, ORF5_{—}23FTW, ORF6_{—}23FTW, ORF7_{—}23FTW, or ORF8_{—}23FTW.

[0704] The S. pneumonaie from 23F Poland 16 AI proteins may be selected from the group consisting of ORF2_{—}23FP, ORF3_{—}23FP, ORF4_{—}23FP, ORF5_{—}23FP, ORF6_{—}23FP, ORF7_{—}23FP, or ORF8_{—}23FP.

[0705] Preferably, the Gram positive bacteria AI proteins included in the immunogenic compositions of the invention can provide protection across more than one serotype or strain isolate. For example, the immunogenic composition may comprise a first AI protein, wherein the amino acid sequence of said AI protein is at least 90% (i.e., at least 90, 91, 92, 93, 94, 95, 96, 97, 98, 99 or 100%) homologous to the amino acid sequence of a second AI protein, and wherein said first AI protein and said second AI protein are derived from the genomes of different serotypes of a Gram positive bacteria. The first AI protein may also be homologous to the amino acid sequence of a third AI protein, such that the first AI protein, the second AI protein and the third AI protein are derived from the genomes of different serotypes of a Gram positive bacteria. The first AI protein may also be homologous to the amino acid sequence of a fourth AI protein, such that the first AI protein, the second AI protein and the third AI protein are derived from the genomes of different serotypes of a Gram positive bacteria.

[0706] For example, preferably, the GBS AI proteins included in the immunogenic compositions of the invention can provide protection across more than one GBS serotype or strain isolate. For example, the immunogenic composition may comprise a first GBS AI protein, wherein the amino acid sequence of said AI protein is at least 90% (i.e., at least 90, 91, 92, 93, 94, 95, 96, 97, 98, 99 or 100%) homologous to the amino acid sequence of a second GBS AI protein, and wherein said first AI protein and said second AI protein are derived from the genomes of different GBS serotypes. The first GBS AI protein may also be homologous to the amino acid sequence of a third GBS AI protein, such that the first AI protein, the second AI protein and the third AI protein are derived from the genomes of different GBS serotypes. The first AI protein may also be homologous to the amino acid sequence of a fourth GBS AI protein, such that the first AI protein, the second AI protein and the third AI protein are derived from the genomes of different GBS serotypes.

[0707] The first AI protein may be selected from an AI-1 protein or an AI-2 protein. For example, the first AI protein may be a GBS AI-1 surface protein such as GBS 80. The amino acid sequence of GBS 80 from GBS serotype V, strain isolate 2603 is greater than 90% homologous to the GBS 80 amino acid sequence from GBS serotype III, strain isolates NEM316 and COH1 and the GBS 80 amino acid sequence from GBS serotype 1a, strain isolate A909.

[0708] As another example, the first AI protein may be GBS 104. The amino acid sequence of GBS 104 from GBS serotype V, strain isolate 2603 is greater than 90% homologous to the GBS 104 amino acid sequence from GBS serotype III, strain isolates NEM316 and COH1, the GBS 104 amino acid sequence from GBS serotype 1a, strain isolate A909, and the GBS 104 amino acid sequence serotype II, strain isolate 18RS21.

[0709] Table 12 provides the amino acid sequence identity of GBS 80 and GBS 104 across GBS serotypes Ia, Ib, II, III, V, and VIII. The GBS strains in which genes encoding GBS 80 and GBS 104 were identified share, on average, 99.88 and 99.96 amino acid sequence identity, respectively. This high degree of amino acid identity indicates that an immunogenic composition comprising a first protein of GBS 80 or GBS 104 may provide protection across more than one GBS serotype or strain isolate.

TABLE 12
Conservation of GBS 80 and GBS 104 amino acid sequences

| | | GBS 80 | | GBS 104 | |
|---|---|---|---|---|---|
| Serotype | Strains | cGH | % AA identity | cGH | % AA identity |
| Ia | 090 | + | 99.79 | + | 100.00 |
| | A909 | + | 100.00 | + | 100.00 |
| | 515 | − | | − | |
| | DK1 | − | | − | |
| | DK8 | − | | − | |
| | Davis | − | | − | |
| Ib | 7357b | + | 100.00 | + | |
| | H36B | − | | − | |
| II | 18RS21 | − | | + | 100.00 |
| | DK21 | − | | − | |
| III | NEM316 | + | 100.00 | + | 100.00 |
| | COH31 | + | 100.00 | + | |
| | D136 | + | 100.00 | + | |
| | M732 | + | 100.00 | + | 99.88 |
| | COH1 | + | 99.79 | + | 99.88 |
| | M781 | + | 99.79 | + | 99.88 |
| No type | CJB110 | + | 99.37 | + | 100.00 |
| | 1169NT | − | | − | |
| V | CJB111 | + | 100.00 | + | 100.00 |
| | 2603 | + | 100.00 | + | 100.00 |
| VIII | JM130013 | + | 99.79 | + | 100.00 |
| | SMU014 | + | 100.00 | + | |

| | | | | |
|---|---|---|---|---|
| total | 14/22 | 99.88 +/− 0.19 | 15/22 | 99.96 +/− 0.056 |

[0710] As another example, the first AI protein may be an AI-2 protein such as GBS 67. The amino acid sequence of GBS 67 from GBS serotype V, strain isolate 2603 is greater than 90% homologous to the GBS 67 amino acid sequence from GBS serotype III, strain isolate NEM316, the GBS 67 amino acid sequence from GBS serotype 1b, strain isolate H36B, and the GBS 67 amino acid sequence from GBS serotype II, strain isolate 17RS21.

[0711] As another example, the first AI protein may be an AI-2 protein such as spb1. The amino acid sequence of spb1 from GBS serotype III, strain isolate COH1 is greater than 90% homologous to the spb1 amino acid sequence from GBS serotype Ia, strain isolate A909.

[0712] As yet another example, the first AI protein may be an AI-2 protein such as GBS 59. The amino acid sequence of GBS 59 from GBS serotype II, strain isolate 18RS21 is 100% homologous to the GBS 59 amino acid sequence from GBS serotype V, strain isolate 2603. The amino acid sequence of GBS 59 from GBS serotype V, strain isolate CJB111 is 98% homologous to the GBS 59 amino acid sequence from GBS serotype III, strain isolate NEM316.

[0713] The compositions of the invention may also be designed to include Gram positive AI proteins from divergent serotypes or strain isolates, i.e., to include a first AI protein which is present in one collection of serotypes or strain isolates of a Gram positive bacteria and a second AI protein which is present in those serotypes or strain isolates not represented by the first AI protein.

[0714] For example, the invention may include an immunogenic composition comprising a first and second Gram positive bacteria AI protein, wherein a polynucleotide sequence encoding for the full length sequence of the first AI protein is not present in a similar Gram positive bacterial genome comprising a polynucleotide sequence encoding for the second AI protein.

[0715] The compositions of the invention may also be designed to include AI proteins from divergent GBS serotypes or strain isolates, i.e., to include a first AI protein which is present in one collection of GBS serotypes or strain isolates and a second AI protein which is present in those serotypes or strain isolates not represented by the first AI protein.

[0716] For example, the invention may include an immunogenic composition comprising a first and second GBS AI protein, wherein a polynucleotide sequence encoding for the full length sequence of the first GBS AI protein is not present in a genome comprising a polynucleotide sequence encoding for the second GBS AI protein. For example, the first AI protein could be GBS 80 (such as the GBS 80 sequence from GBS serotype V, strain isolate 2603). As previously discussed (and depicted in FIG. 2), the sequence for GBS 80 in GBS serotype II, strain isolate 18RS21 is disrupted. In this instance, the second AI protein could be GBS 104 or GBS 67 (sequences selected from the GBS serotype II, strain isolate 18RS21).

[0717] Further, the invention may include an immunogenic composition comprising a first and second GBS AI protein, wherein the first GBS AI protein has detectable surface exposure on a first GBS strain or serotype but not a second GBS strain or serotype and the second GBS AI protein has detectable surface exposure on a second GBS strain or serotype but not a first GBS strain or serotype. For example, the first AI protein could be GBS 80 and the second AI protein could be GBS 67. As seen in Table 15, there are some GBS serotypes and strains that have surface exposed GBS 80 but that do not have surface exposed GBS 67 and vice versa. An immunogenic composition comprising a GBS 80 and a GBS 67 protein may provide protection across a wider group of GBS strains and serotypes.

TABLE 15
Antigen surface exposure of GBS 80, GBS 322, GBS 104, and GBS 67

| GBS strains | Type | GBS 80 | GBS 322 | GBS 104 | GBS 67 |
|---|---|---|---|---|---|
| DK1* | Ia | 0 | nd | 237 | 478 |
| DK8* | | 0 | 213 | 151 | 475 |
| Davis* | | 0 | 86 | 271 | 430 |
| 515* | | 0 | 227 | 262 | 409 |
| 090 | | 0 | 0 | 0 | 0 |
| A909 | | 0 | 0 | 0 | 0 |
| 2986 | | 0 | 0 | 157 | 397 |
| 5551 | | 0 | 36 | 384 | 485 |
| 2177 | Ib | 477 | 323 | 328 | 66 |
| H36B* | | 0 | 105 | 518 | 444 |
| 7357b- | | 91 | 102 | 309 | 316 |
| 2129 | | 57 | 71 | 132 | 0 |
| 5518 | | 31 | nd | 60 | 28 |
| COH1 | III | 305 | 130 | 305 | 0 |
| D136C | | 16 | 460 | 226 | 406 |
| COH31 | | 0 | 479 | 71 | 273 |
| M732 | | 105 | 292 | 101 | 0 |
| M781 | | 65 | 224 | 136 | 0 |
| 1998 | | 95 | 288 | 205 | 350 |
| 5376 | | 165 | 76 | 156 | 0 |
| 5435 | | 93 | 88 | 100 | 0 |
| 18RS21 | II | 0 | 471 | 50 | 103 |
| DK21* | | 0 | 342 | 419 | 331 |
| 3050 | | 43 | 188 | 289 | 460 |
| 5401 | | 170 | 135 | 494 | 618 |
| 2141 | | 0 | 76 | 0 | 69 |
| CJB111 | V | 365 | 58 | 355 | 481 |
| 2603 | | 62 | 293 | 100 | 105 |
| 5364 | | 454 | 463 | 379 | 394 |
| 2110 | | 0 | 11 | 345 | 589 |
| 2274 | IV | 113 | 161 | 465 | 484 |
| 1999 | | 0 | 55 | 492 | 453 |
| 2210 | | 0 | 0 | 363 | 574 |
| 2928 | VII | 0 | 0 | 0 | 0 |
| SMU071 | VIII | 556 | 170 | 393 | 79 |
| JM9130013 | | 587 | 133 | 436 | 83 |
| 2189 | | 0 | 0 | 0 | 0 |
| 5408 | | 0 | 0 | 159 | 433 |
| CJB110 | NT | 71 | 587 | 169 | 245 |
| 1169* | | 0 | 213 | 371 | 443 |
| Δ Mean >100 | | 9/40 | 22/38 | 32/40 | 25/40 |
| | | 22% | 58% | 80% | 62% |

[0718] Alternatively, the invention may include an immunogenic composition comprising a first and second Gram positive bacteria AI protein, wherein the polynucleotide sequence encoding the sequence of the first AI protein is less than 90% (i.e., less than 90, 88, 86, 84, 82, 80, 78, 76, 74, 72, 70, 65, 60, 55, 50, 45, 40, 35 or 30 percent) homologous than the corresponding sequence in the genome of the second AI protein.

[0719] The invention may include an immunogenic composition comprising a first and second GBS AI protein, wherein the polynucleotide sequence encoding the sequence of the first GBS AI protein is less than 90% (i.e., less than 90, 88, 86, 84, 82, 80, 78, 76, 74, 72, 70, 65, 60, 55, 50, 45, 40, 35 or 30 percent) homologous than the corresponding sequence in the genome of the second GBS AI protein. For example, the first GBS AI protein could be GBS 67 (such as the GBS 67 sequence from GBS serotype 1b, strain isolate H36B). As shown in FIGS. 2 and 4, the GBS 67 sequence for this strain is less than 90% homologous (87%) to the corresponding GBS 67 sequence in GBS serotype V, strain isolate 2603. In this instance, the second GBS AI protein could then be the GBS 80 sequence from GBS serotype V, strain isolate 2603.

[0720] An example immunogenic composition of the invention may comprise adhesin island proteins GBS 80, GBS 104, GBS 67, and GBS 59, and non-AI protein GBS 322. SACS analysis of different GBS strains demonstrates that at least one of these five proteins is always found to be expressed on the surface of GBS bacteria. An initial FACS analysis of 70 strains of GBS bacteria, obtained from the CDC in the United States (33 strains), ISS in Italy (17 strains), and Houston/Harvard (20 strains), detected surface exposure of at least one of GBS 80, GBS 104, GBS 322, GBS 67, or GBS 59 on the surface of the GBS bacteria. FIG. 227 provides the FACS data obtained for surface exposure of GBS 80, GBS 104, GBS 67, GBS 322, and GBS 59 on each of 37 GBS strains. FIG. 228 provides the FACS data obtained for surface exposure of GBS 80, GBS 104, GBS 67, GBS 322, and GBS 59 on each of 41 GBS strains obtained from the CDC. As can be seen from FIGS. 227 and 228, each GBS strain had surface expression of at least one of GBS 80, GBS 104, GBS 67, GBS 322, and GBS 59. The surface exposure of at least one of these proteins on each bacterial strain indicates that an immunogenic composition comprising these proteins will provide wide protection across GBS strains and serotypes.

[0721] The surface exposed GBS 80, GBS 104, GBS 67, GBS 322, and GBS 59 proteins are also present at high levels as determined by FACS. Table 49 summarizes the FACS results for the initial 70 GBS strains examined for GBS 80, GBS 104, GBS 67, GBS 322, and GBS 59 surface expression A protein was designated as having high levels of surface expression of a protein if a five-fold shift in fluorescence was observed when using antibodies for the protein relative to preimmune control serum.

TABLE 49
Exposure Levels of GBS 80, GBS 104, GBS 67, GBS 322, and
GBS 59 on GBS Strains

| | GBS 80 | GBS 104 | GBS 67 | GBS 59 | GBS 322 |
|---|---|---|---|---|---|
| 5-fold shift in | 17/70 | 14/70 | 49/70 | 46/70 | 33/70 |
| fluorescence | 24% | 20% | 70% | 66% | 47% |
| by FACS | | | | | |

[0722] Table 50 details which of the surface proteins is highly expressed on the different GBS serotype.

TABLE 50
High Levels of Surface Protein Expression on GBS Serotypes

| 5-fold shift in | | | | | |
|---|---|---|---|---|---|
| fluorescence | | | | | |
| by FACS | GBS 80 | GBS 104 | GBS 67 | GBS 59 | GBS 322 |
| Ia + Ib + III | 4/36 | 2/36 | 22/36 | 20/36 | 18/36 |
| II + V | 11/25 | 9/25 | 21/25 | 21/25 | 13/25 |
| Others | 2/9 | 3/9 | 6/9 | 5/9 | 2/9 |

[0723] Alternatively, the immunogenic composition of the invention may include GBS 80, GBS 104, GBS 67, and GBS 322. Assuming that protein antigens that are highly accessible to antibodies confer 100% protection with suitable adjuvants, an immunogenic composition containing GBS 80, GBS 104, GBS 67, GBS 59 and GBS 322 will provide protection for 89% of GBS strains and serotypes, the same percentage as an immunogenic composition containing GBS 80, GBS 104, GBS 67, and GBS 322 proteins. See FIG. 229. However, it may be preferable to include GBS 59 in the composition to increase its immunogenic strength. As seen from Table 50, GBS 59 is highly expressed on the surface two-thirds of GBS bacteria examined by FACS analysis, unlike GBS 80, GBS 104, and GBS 322, which are highly expressed in less than half of GBS bacteria examined. GBS 59 opsonophagocytic activity is also comparable to that of a mix of GBS 322, GBS 104, GBS 67, and GBS 80 proteins. See FIG. 230.

[0724] By way of another example, preferably, the GAS AI proteins included in the immunogenic compositions of the invention can provide protection across more than one GAS serotype or strain isolate. For example, the immunogenic composition may comprise a first GAS AI protein, wherein the amino acid sequence of said AI protein is at least 90% (i.e., at least 90, 91, 92, 93, 94, 95, 96, 97, 98, 99 or 100%) homologous to the amino acid sequence of a second GAS AI protein, and wherein said first AI protein and said second AI protein are derived from the genomes of different GAS serotypes. The first GAS AI protein may also be homologous to the amino acid sequence of a third GAS AI protein, such that the first AI protein, the second AI protein and the third AI protein are derived from the genomes of different GAS serotypes. The first AI protein may also be homologous to the amino acid sequence of a fourth GAS AI protein, such that the first AI protein, the second AI protein and the third AI protein are derived from the genomes of different GAS serotypes.

[0725] The compositions of the invention may also be designed to include GAS AI proteins from divergent serotypes or strain isolates, i.e., to include a first AI protein which is present in one collection of serotypes or strain isolates of a GAS bacteria and a second AI protein which is present in those serotypes or strain isolates not represented by the first AI protein.

[0726] For example, the first AI protein could be a prtF2 protein (such as the 19224141 protein from GAS serotype M12, strain isolate A735). As previously discussed (and depicted in FIG. 164), the sequence for a prtF2 protein is not present in GAS AI types 1 or 2. In this instance, the second AI protein could be collagen binding protein M6_Spy0159 (from M6 isolate (MGAS10394), which comprises an AI-1) or GAS15 (from M1 isolate (SF370), which comprises an AI-2).

[0727] Further, the invention may include an immunogenic composition comprising a first and second GAS AI protein, wherein the first GAS AI protein has detectable surface exposure on a first GAS strain or serotype but not a second GAS strain or serotype and the second GAS AI protein has detectable surface exposure on a second GAS strain or serotype but not a first GAS strain or serotype.

[0728] The invention may include an immunogenic composition comprising a first and second GAS AI protein, wherein the polynucleotide sequence encoding the sequence of the first GAS AI protein is less than 90% (i.e., less than 90, 88, 86, 84, 82, 80, 78, 76, 74, 72, 70, 65, 60, 55, 50, 45, 40, 35 or 30 percent) homologous than the corresponding sequence in the genome of the second GAS AI protein. Preferably the first and second GAS AI proteins are subunits of the pilus. More preferably the first and second GAS AI proteins are selected from the major pilus forming proteins (i.e., M6_Spy0160 from M6 strain 10394, SPy0128 from M1 strain SF370, SpyM3_{—}0100 from M3 strain 315, SPs0102 from M3 strain SSI, orf80 from M5 isolate Manfredo, spyM18_{—}0128 from M18 strain 8232, SpyoM01000153 from M49 strain 591, 19224137 from M12 strain A735, fimbrial structural subunit from M77 strain ISS4959, fimbrial structural subunit from M44 strain ISS3776, fimbrial structural subunit from M50 strain ISS3776 ISS 4538, fimbrial structural subunit from M12 strain CDC SS635, fimbrial structural subunit from M23 strain DSM2071, fimbrial structural subunit from M6 strain CDC SS410). Table 45 provides the percent identity between the amino acidic sequences of each of the main pilus forming subunits from GAS AI-1, AI-2, AI-3, and AI-4 representative strains (i.e., M6_Spy0160 from M6 strain 10394, SPy0128 from M1 strain SF370, SpyM3_{—}0100 from M3 strain 315, SPs012 from M3 strain SSI, orf80 from M5 isolate Manfredo, spyM18_{—}0128 from M18 strain 8232, SpyoM01000153 from M49 strain 591, 19224137 from M12 strain A735, Fimbrial structural subunit from M77 strain ISS4959, fimbrial structural subunit from M44 strain ISS3776, fimbrial structural subunit from M50 strain ISS3776 ISS 4538, fimbrial structural subunit from M12 strain CDC SS635, fimbrial structural subunit from M23 strain DSM2071, fimbrial structural subunit from M6 strain CDC SS410).

TABLE 45
Comparison of Amino Acid Sequences of Major Pilus Proteins in the Four GAS
AIs

| | | AI-1 | AI-2 | AI-3 | | | AI-4 |
|---|---|---|---|---|---|---|---|
| | | M6-10394 | M1-370 | M3-315 | M5-Manfredo | M18-8232 | M12-A735 |
| AI-1 | M6-10394 | 100% | 23% | 25% | 23% | 24% | 26% |
| | | M6-10394 | | | | | |
| | | M6-SS-410 | | | | | |
| | | 56% M23 | | | | | |
| | | DSM2071 | | | | | |
| AI-2 | M1-370 | 23% | 100% | 40% | 41% | 38% | 40% |
| AI-3 | M3-315 | 25% | 40% | 100% | 64% | 67% | 61% |
| | | | | M3-315 | | | |
| | | | | M3-SSI-1 | | | |
| | M5-Manfredo | 23% | 39% | 64% | 100% | 60% | 65% |
| | | | | | M5-Manfredo | | |
| | | | | | M44-3776 | | |
| | | | | | M77-4959 | | |
| | M18-8232 | 24% | 38% | 67% | 60% | 90% | 62% |
| | | | | | | M18-8232 | |
| | | | | | | M49-591 | |
| AI-4 | M12-A735 | 26% | 40% | 61% | 65% | 62% | 97-100% |
| | | | | | | | M12-735 |
| | | | | | | | M12-SS-635 |
| | | | | | | | M50-4538 |

[0729] For example, the first main pilus subunit may be selected from bacteria of GAS serotype M6 strain 10394 and the second main pilus subunit may be selected from bacteria of GAS serotype M1 strain 370. As can be seen from Table 45, the main pilus subunits encoded by these strains of bacteria share only 23% nucleotide identity. An immunogenic composition comprising pilus main subunits from each of these strains of bacteria is expected to provide protection across a wider group of GAS strains and serotypes. Other examples of main pilus subunits that can be used in combination to provide increased protection across a wider range of GAS strains and serotypes include proteins encoded by GAS serotype M5 Manfredo isolate and serotype M6 strain 10394, which share 23% sequence identity, GAS serotype M18 strain 8232 and serotype M1 strain 370, which share 38% sequence identity, GAS serotype M3 strain 315 and serotype M12 strain A735, which share 61% sequence identity, and GAS serotype M3 strain 315 and serotype M6 strain 10394 which share 25% sequence identity.

[0730] As also can be seen from Table 45, the amino acid sequences of the four types of main pilus subunits present in GAS are relatively divergent. FIGS. 198-201 provide further tables comparing the percent identity of adhesin island-encoded surface exposed proteins for different GAS serotypes relative to other GAS serotypes harbouring an adhesin island of the same or a different subtype (GAS AI-1, GAS AI-2, GAS AI-3, and GAS AI-4). See also further discussion below.

[0731] Immunizations with the Adhesin Island proteins of the invention are discussed further in the Examples.

### Co-Expression of GBS Adhesin Island Proteins and Role of GBS AI Proteins in Surface Presentation

[0732] In addition to the use of the GBS adhesin island proteins for cross strain and cross serotype protection, Applicants have identified interactions between adhesin island proteins which appear to affect the delivery or presentation of the surface proteins on the surface of the bacteria.

[0733] In particular, Applicants have discovered that surface exposure of GBS 104 is dependent on the concurrent expression of GBS 80. As discussed further in Example 2, reverse transcriptase PCR analysis of AI-1 shows that all of the AI genes are co-transcribed as an operon. Applicants constructed a series of mutant GBS containing in frame deletions of various AI-1 genes. (A schematic of the GBS mutants is presented in FIG. 7). FACS analysis of the various mutants comparing mean shift values using anti-GBS 80 versus anti-GBS 104 antibodies is presented in FIG. 8. Removal of the GBS 80 operon prevented surface exposure of GBS 104; removal of the

[symbol]

theory, it is thought that GBS 80 is involved in the transport or localization of GBS 104 to the surface of the bacteria. The two proteins may be oligomerized or otherwise associated. It is possible that this association involves a conformational change in GBS 104 that facilitates its transition to the surface of the GBS bacteria.

[0734] Pili structures that comprise GBS 104 appear to be of a lower molecular weight than pili structures lacking GBS 104. FIG. 68 shows that polyclonal anti-GBS 104 antibodies (see lane marked α-104 POLIC.) cross-hybridize with smaller structures than do polyclonal anti-GBS 80 antibodies (see lane marked A-GBS 80 POLIC.).

[0735] In addition, Applicants have shown that removal of GBS 80 can cause attenuation, further suggesting the protein contributes to virulence. As described in more detail in Example 3, the LD₅₀'s for the Δ80 mutant and the Δ80, Δ104 double mutant were reduced by an order of magnitude compared to wildtype and Δ104 mutant.

[0736] The sortases within the adhesin island also appear to play a role in localization and presentation of the surface proteins. As discussed further in Example 4, FACS analysis of various sortase deletion mutants showed that removal of sortase SAG0648 prevented GBS 104 from reaching the surface and slightly reduced the surface exposure of GBS 80. When sortase SAG0647 and sortase SAG0648 were both knocked out, neither GBS 80 nor GBS 104 were surface exposed. Expression of either sortase alone was sufficient for GBS 80 to arrive at the bacterial surface. Expression of SAG0648, however, was required for GBS 104 surface localization.

[0737] Accordingly, the compositions of the invention may include two or more AI proteins, wherein the AI proteins are physically or chemically associated. For example, the two AI proteins may form an oligomer. In one embodiment, the associated proteins are two AI surface proteins, such as GBS 80 and GBS 104. The associated proteins may be AI surface proteins from different adhesin islands, including host cell adhesin island proteins if the AI surface proteins are expressed in a recombinant system. For example, the associated proteins may be GBS 80 and GBS 67.

Adhesin Island Proteins from Other Gram Positive Bacteria

[0738] Applicants' identification and analysis of the GBS adhesin islands and the immunological and biological functions of these AI proteins and their pilus structures provides insight into similar structures in other Gram positive bacteria.

[0739] As discussed above, “Adhesin Island” or “AI” refers to a series of open reading frames within a bacterial genome that encode for a collection of surface proteins and sortases. An Adhesin Island may encode for amino acid sequences comprising at least one surface protein. The Adhesin Island may encode at least one surface protein. Alternatively, an Adhesin Island may encode for at least two surface proteins and at least one sortase. Preferably, an Adhesin Island encodes for at least three surface proteins and at least two sortases. One or more of the surface proteins may include an LPXTG motif (such as LPXTG (SEQ ID NO: 122)) or other sortase substrate motif. One or more AI suface proteins may participate in the formation of a pilus sturcture on the surface of the Gram positive bacteria.

[0740] Gram positive adhesin islands of the invention preferably include a divergently transcribed transcriptional regulator. The transcriptional regulator may regulate the expression of the AI operon.

[0741] The invention includes a composition comprising one or more Gram positive bacteria AI surface proteins. Such AI surface proteins may be associated in an oligomeric or hyperoligomeric structure.

[0742] Preferred Gram positive adhesin island proteins for use in the invention may be derived from Staphylococcus (such as S. aureus), Streptococcus (such as S. agalactiae (GBS), S. pyogenes (GAS), S. pneumonaie, S. mutans), Enterococcus (such as E. faecalis and E. faecium), Clostridium (such as C. difficile), Listeria (such as L. monocytogenes) and Corynebacterium (such as C. diphtheria).

[0743] One or more of the Gram positive AI surface protein sequences typically include an LPXTG motif or other sortase substrate motif Gram positive AI surface proteins of the invention may affect the ability of the Gram positive bacteria to adhere to and invade epithelial cells. AI surface proteins may also affect the ability of Gram positive bacteria to translocate through an epithelial cell layer. Preferably, one or more AI surface proteins are capable of binding to or otherwise associating with an epithelial cell surface. Gram positive AI surface proteins may also be able to bind to or associate with fibrinogen, fibronectin, or collagen.

[0744] Gram positive AI sortase proteins are predicted to be involved in the secretion and anchoring of the LPXTG containing surface proteins. A Gram positive bacteria AI may encode for at least one surface exposed protein. The Adhesin Island may encode at least one surface protein. Alternatively, a Gram positive bacteria AI may encode for at least two surface exposed proteins and at least one sortase. Preferably, a Gram positive AI encodes for at least three surface exposed proteins and at least two sortases.

[0745] Gram positive AI surface proteins may be covalently attached to the bacterial cell wall by membrane-associated transpeptidases, such as an AI sortase. The sortase may function to cleave the surface protein, preferably between the threonine and glycine residues of an LPXTG motif. The sortase may then assist in the formation of an amide link between the threonine carboxyl group and a cell wall precursor such as lipid II. The precursor can then be incorporated into the peptidoglycan via the transglycoslylation and transpeptidation reactions of bacterial wall synthesis. See Comfort et al., Infection & Immunity (2004) 72(5): 2710-2722. Typically, Gram positive bacteria AI surface proteins of the invention will contain an N-terminal leader or secretion signal to facilitate translocation of the surface protein across the bacterial membrane.

[0746] Gram positive bacteria AI surface proteins of the invention may affect the ability of the Gram positive bacteria to adhere to and invade target host cells, such as epithelial cells. Gram positive bacteria AI surface proteins may also affect the ability of the gram positive bacteria to translocate through an epithelial cell layer. Preferably, one or more of the Gram positive AI surface proteins are capable of binding to or other associating with an epithelial cell surface. Further, one or more Gram positive AI surface proteins may bind to fibrinogen, fibronectin, or collagen protein.

[0747] In one embodiment, the invention includes a composition comprising oligomeric, pilus-like structures comprising a Gram positive bacteria AI surface protein. The oligomeric, pilus-like structure may comprise numerous units of the AI surface protein. Preferably, the oligomeric, pilus-like structures comprise two or more AI surface proteins. Still more preferably, the oligomeric, pilus-like structure comprises a hyper-oligomeric pilus-like structure comprising at least two (e.g., 2, 3, 4, 5, 6, 7, 8, 9, 10, 11, 12, 13, 14, 15, 20, 25, 30, 35, 40, 45, 50, 60, 70, 80, 90, 100, 120, 140, 150, 200 or more) oligomeric subunits, wherein each subunit comprises an AI surface protein or a fragment thereof. The oligomeric subunits may be covalently associated via a conserved lysine within a pilin motif. The oligomeric subunits may be covalently associated via an LPXTG motif, preferably, via the threonine amino acid residue.

[0748] Gram positive bacteria AI surface proteins or fragments thereof to be incorporated into the oligomeric, pilus-like structures of the invention will preferably include one or both of a pilin motif comprising a conserved lysine residue and an E box motif comprising a conserved glutamic acid residue.

[0749] The oligomeric, pilus like structures may be used alone or in the combinations of the invention. In one embodiment, the invention comprises a Gram positive bacteria Adhesin Island in oligomeric form, preferably in a hyperoligomeric form.

[0750] The oligomeric, pilus-like structures of the invention may be combined with one or more additional Gram positive AI proteins (from the same or a different Gram positive species or genus). In one embodiment, the oligomeric, pilus-like structures comprise one or more Gram positive bacteria AI surface proteins in combination with a second Gram positive bacteria protein. The second Gram positive bacteria protein may be a known antigen, and need not normally be associated with an AI protein.

[0751] The oligomeric, pilus-like structures may be isolated or purified from bacterial cultures overexpressing a Gram positive bacteria AI surface protein. The invention therefore includes a method for manufacturing an oligomeric Adhesin Island surface antigen comprising culturing a Gram positive bacteria adapted for increased AI protein expression and isolation of the expressed oligomeric Adhesin Island protein from the Gram positive bacteria. The AI protein may be collected from secretions into the supernatant or it may be purified from the bacterial surface. The method may further comprise purification of the expressed Adhesin Island protein. Preferably, the Adhesin Island protein is in a hyperoligomeric form.

[0752] Gram positive bacteria are preferably adapted to increase AI protein expression by at least two (e.g., 2, 3, 4, 5, 8, 10, 15, 20, 25, 30, 35, 40, 45, 50, 60, 70, 80, 90, 100, 125, 150 or 200) times wild type expression levels.

[0753] Gram positive bacteria may be adapted to increase AI protein expression by means known in the art, including methods of increasing gene dosage and methods of gene upregulation. Such means include, for example, transformation of the Gram positive bacteria with a plasmid encoding the AI protein. The plasmid may include a strong promoter or it may include multiple copies of the sequence encoding the AI protein. Optionally, the sequence encoding the AI protein within the Gram positive bacterial genome may be deleted. Alternatively, or in addition, the promoter regulating the Gram positive Adhesin Island may be modified to increase expression.

[0754] The invention further includes Gram positive bacteria which have been adapted to produce increased levels of AI surface protein. In particular, the invention includes Gram positive bacteria which have been adapted to produce oligomeric or hyperoligomeric AI surface protein. In one embodiment, the Gram positive bacteria of the invention are inactivated or attenuated to permit in vivo delivery of the whole bacteria, with the AI surface protein exposed on its surface.

[0755] The invention further includes Gram positive bacteria which have been adapted to have increased levels of expressed AI protein incorporated in pili on their surface. The Gram positive bacteria may be adapted to have increased exposure of oligomeric or hyperoligomeric AI proteins on its surface by increasing expression levels of a signal peptidase polypeptide. Increased levels of a local signal peptidase expression in Gram positive bacteria (such as LepA in GAS) are expected to result in increased exposure of pili proteins on the surface of Gram positive bacteria. Increased expression of a leader peptidase in Gram positive may be achieved by any means known in the art, such as increasing gene dosage and methods of gene upregulation. The Gram positive bacteria adapted to have increased levels of leader peptidase may additionally be adapted to express increased levels of at least one pili protein.

[0756] Alternatively, the AI proteins of the invention may be expressed on the surface of a non-pathogenic Gram positive bacteria, such as Streptococcus gordonii (See, e.g., Byrd et al., “Biological consequences of antigen and cytokine co-expression by recombinant Streptococcus gordonii vaccine vectors”, Vaccine (2002) 20:2197-2205) or Lactococcus lactis (See, e.g., Mannam et al., “Mucosal VaccineMade from Live, Recombinant Lactococcus lactis Protects Mice against Pharangeal Infection with Streptococcus pyogenes” Infection and Immunity (2004) 72(6):3444-3450). It has already been demonstrated, above, that L. lactis expresses GBS and GAS AI polypeptides in oligomeric form and on its surface.

[0757] Alternatively, the oligomeric, pilus-like structures may be produced recombinantly. If produced in a recombinant host cell system, the Gram positive bacteria AI surface protein will preferably be expressed in coordination with the expression of one or more of the AI sortases of the invention. Such AI sortases will facilitate oligomeric or hyperoligomeric formation of the AI surface protein subunits.

[0758] Gram positive AI Sortases of the invention will typically have a signal peptide sequence within the first 70 amino acid residues. They may also include a transmembrane sequence within 50 amino acid residues of the C terminus. The sortases may also include at least one basic amino acid residue within the last 8 amino acids. Preferably, the sortases have one or more active site residues, such as a catalytic cysteine and histidine.

[0759] Adhesion island surface proteins from two or more Gram positive bacterial genus or species may be combined to provide an immunogenic composition for prophylactic or therapeutic treatment of disease or infection of two more Gram positive bacterial genus or species. Optionally, the adhesin island surface proteins may be associated together in an oligomeric or hyperoligomeric structure.

[0760] In one embodiment, the invention comprises an adhesin island surface proteins from two or more Streptococcus species. For example, the invention includes a composition comprising a GBS AI surface protein and a GAS adhesin island surface protein. As another example, the invention includes a composition comprising a GAS adhesin island surface protein and a S. pneumoniae adhesin island surface protein.

[0761] In one embodiment, the invention comprises an adhesin island surface protein from two or more Gram positive bacterial genus. For example, the invention includes a composition comprising a Streptococcus adhesin island protein and a Corynebacterium adhesin island protein.

[0762] Examples of AI sequences in several Gram positive bacteria are discussed further below.

Streptococcus pyogenes (GAS)

[0763] As discussed above, Applicants have identified at least four different GAS Adhesin Islands. These adhesion islands are thought to encode surface proteins which are important in the bacteria's virulence, and Applicants have obtained the first electron micrographs revealing the presence of these adhesin island proteins in hyperoligomeric pilus structures on the surface of Group A Streptococcus.

[0764] Group A Streptococcus is a human specific pathogen which causes a wide variety of diseases ranging from pharyngitis and impetigo through life threatening invasive disease and necrotizing fasciitis. In addition, post-streptococcal autoimmune responses are still a major cause of cardiac pathology in children.

[0765] Group A Streptococcal infection of its human host can generally occur in three phases. The first phase involves attachment and/or invasion of the bacteria into host tissue and multiplication of the bacteria within the extracellular spaces. Generally this attachment phase begins in the throat or the skin. The deeper the tissue level infected, the more severe the damage that can be caused. In the second stage of infection, the bacteria secrete a soluble toxin that diffuses into the surrounding tissue or even systemically through the vasculature. This toxin binds to susceptible host cell receptors and triggers innappropropriate immune responses by these host cells, resulting in pathology. Because the toxin can diffuse throughout the host, the necrosis directly caused by the GAS toxins may be physically located in sites distant from the bacterial infection. The final phase of GAS infection can occur long after the original bacteria have been cleared from the host system. At this stage, the host's previous immune response to the GAS bacteria due to cross reactivity between epitopes of a GAS surface protein, M, and host tissues, such as the heart. A general review of GAS infection can be found in Principles of Bacterial Pathogeneis, Groisman ed., Chapter 15 (2001).

[0766] In order to prevent the pathogenic effects associated with the later stages of GAS infection, an effective vaccine against GAS will preferably facilitate host elimination of the bacteria during the initial attachment and invasion stage.

[0767] Isolates of Group A Streptococcus are historically classified according to the M surface protein described above. The M protein is surface exposed trypsin-sensitive protein generally comprising two polypeptide chains complexed in an alpha helical formation. The carboxyl terminus is anchored in the cytoplasmic membrane and is highly conserved among all group A streptococci. The amino terminus, which extends through the cell wall to the cell surface, is responsible for the antigenic variability observed among the 80 or more serotypes of M proteins.

[0768] A second layer of classification is based on a variable, trypsin-resistant surface antigen, commonly referred to as the T-antigen. Decades of epidemiology based on M and T serological typing have been central to studies on the biological diversity and disease causing potential of Group A Streptococci. While the M-protein component and its inherent variability have been extensively characterized, even after five decades of study, there is still very little known about the structure and variability of T-antigens. Antisera to define T types are commercially available from several sources, including Sevapharma (http://www.sevapharma.cz/en).

[0769] The gene coding for one form of T-antigen, T-type 6, from an M6 strain of GAS (D741) has been cloned and characterized and maps to an approximately 11 kb highly variable pathogenicity island. Schneewind et al., J Bacteriol. (1990) 172(6):3310-3317. This island is known as the Fibronectin-binding, Collagen-binding T-antigen (FCT) region because it contains, in addition to the T6 coding gene (tee6), members of a family of genes coding for Extra Cellular Matrix (ECM) binding proteins. Bessen et al., Infection & Immunity (2002) 70(3):1159-1167. Several of the protein products of this gene family have been shown to directly bind either fibronectin and/or collagen. See Hanski et al., Infection & Immunity (1992) 60(12):5119-5125; Talay et al., Infection & Immunity (1992(60(9):3837-3844; Jaffe et al. (1996) 21(2):373-384; Rocha et al., Adv Exp Med Biol. (1997) 418:737-739; Kreikemeyer et al., J Biol Chem (2004) 279(16):15850-15859; Podbielski et al., Mol. Microbiol. (1999) 31(4):1051-64; and Kreikemeyer et al., Int. J. Med Microbiol (2004) 294(2-3):177-88. In some cases direct evidence for a role of these proteins in adhesion and invasion has been obtained.

[0770] Applicants raised antiserum against a recombinant product of the tee6 gene and used it to explore the expression of T6 in M6 strain ISS3650. In immunoblot of mutanolysin extracts of this strain, the antiserum recognized, in addition to a band corresponding to the predicted molecular mass of the tee6 gene product, very high molecular weight ladders ranging in mobility from about 100 kDa to beyond the resolution of the 3-8% gradient gels used. See FIG. 163A, last lane labeled “M6_Tee6.”

[0771] This pattern of high molecular weight products is similar to that observed in immunoblots of the protein components of the pili identified in Streptococcus agalactiae (described above) and previously in Corynebacterium diphtheriae. Electron microscopy of strain M6 ISS3650 with antisera specific for the product of tee6 revealed abundant surface staining and long pilus like structures extending up to 700 nanometers from the bacterial surface, revealing that the T6 protein, one of the anitgens recognized in the original Lancefield serotyping system, is located within a GAS Adhesion Island (GAS AI-1) and forms long covalently linked pilus structures. See FIG. 163I.

[0772] In addition to the tee6 gene, the FCT region in M6_ISS3650 (GAS AI-1) contains two other genes (prtF1 and cpa) predicted to code for surface exposed proteins; these proteins are characterized as containing the cell wall attachment motif LPXTG. Western blot analysis using antiserum specific for PrtF1 detected a single molecular species with electrophoretic mobility corresponding to the predicted molecular mass of the protein and one smaller band of unknown origin. Western blot analysis using antisera specific for Cpa recognized a high molecular weight covalently linked ladder (FIG. 163A, second lane). Immunogold labelling of Cpa with specific antiserum followed by transmission electron microscopy detected an abundance of Cpa at the cell surface and only occasional structures extending from the cell surface (FIG. 163J).

[0773] Four classes of FCT region can be discerned by the types and order of the genes contained within the region. The FCT region of strains of types M3, M5, M18 and M49 have a similar organization whereas those of M6, M1 and M12 differ. See FIG. 164. As discussed below, these four FCT regions correlate to four GAS Adhesin Island types (AI-1, AI-2, AI-3 and AI-4).

[0774] Applicants discovery of genes coding for pili in the FCT region of strain M6_ISS3650 prompted them to examine the predicted surface exposed proteins in the variant FCT regions of three other GAS strains of having different M-type (M1_SF370, M5_ISS4883 and M12_{—}20010296) representing the other three FCT variants. Each gene present in the FCT region of each bacteria was cloned and expressed. Antisera specific for each recombinant protein was then used to probe mutanolysin extracts of the respective strains (6). In M1 strain SF370, there are three predicted surface proteins (Cpa (also referred to as M1_{—}126 and GAS 15), M1_{—}128 (a fimbrial protein also referred to as Spy0128 and GAS 16), and M1_{—}130 (also referred to as Spy0130 and GAS 18)) (GAS AI-2). Antisera specific for each surface protein reacted with a ladder of high molecular weight material (FIG. 163B). Immunogold staining of M1 strain SF370 with antiserum specific for M1_{—}128 revealed pili structures similar to those seen when M6 strain ISS3650 was immunogold stained with antiserum specific for tee6 (See FIG. 1163K). Antisera specific for surface proteins Cpa and M1_{—}130 revealed abundant surface staining and occasional structures extending from the surface of M1 strain SF370 bacteria (FIG. 163S).

[0775] The M1_{—}128 protein appears to be necessary for polymerization of Cpa and M1_{—}130 proteins. If the M1_{—}128 gene in M1_SF370 was deleted, Western blot analysis using antibodies that hybridize to Cpa and M1_{—}130 no longer detected high molecular weight ladders comprising the Cpa and M1_{—}130 proteins (FIG. 163 E). See also FIGS. 177 A-C which provide the results of Western blot analysis of the M1_{—}128 (Δ128) deleted bacteria using anti-M1_{—}130 antiserum (FIG. 177 A), anti-M1_{—}128 antiserum (FIG. 177 B), and anti-M1_{—}126 antiserum (FIG. 177

[symbol]

SF370, could not be detected by any of the three antisera in Δ128 bacteria. If the Δ128 bacteria were transformed with a plasmid containing the gene for M1_{—}128, Western blot analysis using antisera specific for Cpa and M1_{—}130 again detected high molecular weight ladders (FIG. 163 H).

[0776] In agreement with the Western blot analysis, immunoelectron microscopy failed to detect pilus assembly on the Δ128 strain SF370 bacteria using M1_{—}128 antisera (FIG. 178 B). Although Δ128 SF370 bacteria were unable to form pili, M1_{—}126 (cpa) and M1_{—}130, which contain sortase substrate motifs, were present on the bacteria's surface. FACS analysis of the M1_{—}128 deleted (Δ128) strain SF370 bacteria also detected both M1_{—}126 and M1_{—}130 on the surface of the Δ128 strain SF370 bacteria. See FIGS. 179 D and F, which show a shift in fluorescence when antibodies immunoreactive to M1_{—}126 and M1_{—}130 are used on Δ128 bacteria. As expected, virtually no shift in fluorescence is observed when antibodies immunoreactive to M1_{—}128 are used with the Δ128 bacteria (FIG. 179 E).

[0777] By contrast, deletion of the M1_{—}130 gene did not effect polymerization of M1_{—}128 (FIG. 163 F). See also FIGS. 177 A-C, which provide Western blot analysis results of the M1_{—}130 deleted (Δ130) strain SF370 bacteria using anti-M1_{—}130 (FIG. 177 A), anti-M1_{—}128 (FIG. 177 B), and anti-M1_{—}126 antiserum (FIG. 177 C). The anti-M1_{—}128 and anti-M1_{—}126 antiserum both detected the presence of high molecular weight ladders in the Δ130 strain SF370 bacteria, indicating that the Δ130 bacteria form pili that comprise M1_{—}126 and M1_{—}128 polypeptides in the absence of M1_{—}130. As expected, the Western blot probed with antiserum immunoreactive with M1_{—}130 did not detect any proteins for the Δ130 bacteria (FIG. 177A).

[0778] Hence, the composition of the pili in GAS resembles that previously described for both C. diphtheria (7, 8) and S. agalactiae (described above) (9) in that each pilus is formed by a backbone component which abundantly stains the pili in EM and is essential for the incorporation of the other components.

[0779] Also similar to C. diphtheria, elimination of the srtC1 gene from the FCT region of M1_SF370 abolished polymerization of all three proteins and assembly of pili (FIG. 163 G). See also FIGS. 177 A-C, which provide Western blot analysis of the SrtC1 deleted (ΔSrtC1) strain SF370 bacteria using anti-M1_{—}130 (FIG. 177 A), anti-M1_{—}128 (FIG. 177 B), and anti-M1_{—}126 antiserum (FIG. 177 C). None of the three antisera immunoreacted with high molecular weight structures (pili) in the ΔSrtC1 bacteria. Confirming that deletion of the SrtC1 gene abrogates pilus assembly in strain SF370, immunoelectron microscopy using antisera against M1_{—}128 failed to detect pilus formation on the bacteria surface. See FIG. 178 C. Although no assembled pili were detected on ΔSrtC1 SF370, M1_{—}128 proteins could be detected on the surface of SF370. Thus, it appeared that SrtC1 deletion prevented pilus assembly on the

[symbol]

cell wall. FACS analysis of the ΔSrtC1 strain SF370 confirmed that deletion of SrtC1 does not eliminate cell surface expression of M1_{—}126, M1_{—}128 or M1_{—}130. See FIG. 179 G-I, which show a shift in fluorescence when antibodies immunoreactive to M1_{—}126 (FIG. 179 G), M1_{—}128 (FIG. 179 H), and M1_{—}130 (FIG. 179 I) are used to detect cell surface protein expression on ΔSrtC1 bacteria. Thus, SrtC1 deletion prevents pilus formation, but not surface anchoring of proteins involved in pilus formation on the surface of bacteria. Another sortase is possibly involved in anchoring of the proteins to the bacteria surface. Pilus polymerization in C. diphtheriae is also dependent on particular sortase enzyme whose gene resides at the same genetic locus as the pilus components (7, 8).

[0780] The LepA signal peptidase, Spy0127, also appears to be essential for pilus assembly in strain SF370. LepA deletion mutants (ΔLepA) of strain SF370 fail to assemble pili on the cell surface. Not only are the ΔLepA mutants unable to assemble pili, they are also deficient at cell surface M1 expression. See FIG. 180, which provides a FACS analysis of the wildtype (A) and ΔLepA mutant (B) SF370 bacteria using M1 antisera. No shift in fluorescence is observed for the ΔLepA mutant bacteria in the presence of M1 immune serum. It is possible that these deletion mutants of LepA will be useful for detecting non-M, non-pili, surface exposed antigens on the surface of GAS, or any Gram positive bacteria. These antigens may also be useful in immunogenic compositions.

[0781] Pili were also observed in M5 strain ISS4882 and M12 strain 20010296. The M5 strain ISS4882 contains genes for four predicted surface exposed proteins (GAS AI-3). Antisera against three of the four products of the FCT region (GAS AI-3) of M5_ISS4883 (Cpa, M5_orf80, M5_orf82) stained high molecular weight ladders in Western blot analysis (FIG. 163 C). Long pili were visible when antisera against M5_orf80 was used in immunogold staining followed by electron microscopy (FIG. 163L).

[0782] The M12 strain 20010296 contains genes for five predicted surface exposed proteins. (GAS AI-4) Antisera against three of the five products of the FCT region (GAS AI-4) of M12-20010296 (Cpa, EftLSL.A, Orf2) stained high molecular weight ladders in Western blot analysis (FIG. 163 D). Long pili were visible when antisera against EftLSL.A were used (FIG. 163 M).

[0783] The major pilus forming proteins identified in the four strains studied by applicants (T6, M1_{—}128, M5_orf80 and EftLSL.A) share between 23% and 65% amino acid identity in any pairwise comparison, indicating that each pilus may represent a different Lancefield T-antigen. Each pilus is part of a trypsin resistant structure on the GAS bacteria surface, as is the case for the Lancefield T antigens. See FIG. 165, which provides a FACS analysis of bacteria harboring each of the FCT types that had or had not been treated with trypsin (6). Following treatment, surface expression of the

[symbol]

specific for the pilus proteins, the bacteria's respective M proteins, or surface proteins not associated with the pili (FIG. 165). Staining the cells with sera specific for proteins associated with the pili was not effected by trypsin treatment, whereas trypsin treatment substantially reduced detection of M-proteins or surface proteins not associated with pili.

[0784] The pili structures identified on the surface of the GAS bacteria were confirmed to be Lancefield T antigens when commercially available T-serotyping sera detected the pili on the surface of bacteria. Western blot analysis was initially performed to determine if polyvalent serum pools (designated T, U, W, X, and Y) could detect recombinant proteins for each of the major pilis components (T6, M1_{—}128, M5_orf80 and EftLSL.A) identified in the strains of bacteria discussed above. Pool U, which contains the T6 serum, recognized the T6 protein specifically (a surface exposed pilus protein from GAS AI-1)(FIG. 166 B). Pool T specifically recognized M1_{—}128 (a surface exposed pilus protein from GAS AI-2) (FIG. 166 A). Pool W recognized both M5_orf80 and EftLSL.A (FIG. 166 C). Using monovalent sera representative of each of the components of each polyvalent pool, applicants confirmed the specificity of the T6 antigen (corresponding to a surface exposed pilus protein from GAS AI-1) (FIG. 166 E) and identified M1_{—}128 as antigen T1 (corresponding to a surface exposed pilus protein from GAS AI-2) (FIG. 166 D), EftLSL.A as antigen T12 (corresponding to a surface exposed pilus protein from GAS AI-4) (FIG. 166 G) and M5_orf80 as a common antigen recognized by the related sera T5, T27 and T44 (corresponding to a surface exposed pilus protein from GAS AI-3).

[0785] Confirming applicants observations, discussed above, that deleting the M1_{—}128 gene from M1_SF370 abolishes pilus formation, the pool T sera stained whole M1_SF370 bacteria (FIG. 166 H) but failed to stain M1_SF370 bacteria lacking the M1_{—}128 gene (FIG. 166 I).

[0786] As discussed above, Applicants have identified at least four different Group A Streptococcus Adhesin Islands. While these GAS AI sequences can be identified in numerous M types, Applicants have surprisingly discovered a correlation between the four main pilus subunits from the four different GAS AI types and specific T classifications. While other trypsin-resistant surface exposed proteins are likely also implicated in the T classification designations, the discovery of the role of the GAS adhesin islands (and the associated hyper-oligomeric pilus like structures) in T classification and GAS serotype variance has important implications for prevention and treatment of GAS infections. Applicants have identified protein components within each of the GAS adhesin islands which are associated with the pilus formation. These proteins are believed to be involved in the bacteria's initial adherence mechanisms. Immunological recognition of these proteins may allow the host immune response to slow or prevent the bacteria's transition into the more pathogenic later stages of infection. In addition, the GAS pili may be involved in formation of biofilms. Applicants have discovered that the GBS pili structures appear to be implicated in the formation of biofilms (populations of bacteria growing-on a surface, often enclosed in an exopolysaccharide matrix). Biofilms are generally associated with bacterial resistance, as antibiotic treatments and host immune response are frequently

[symbol]

response against surface proteins exposed during the first steps of bacterial attachment (i.e., before complete biofilm formation) is preferable.

[0787] The invention therefore provides for improved immunogenic compositions against GAS infection which may target GAS bacteria during their initial attachment efforts to the host epithelial cells and may provide protection against a wide range of GAS serotypes. The immunogenic compositions of the invention include GAS AI surface proteins which may be formulated in an oligomeric, or hyperoligomeric (pilus) form. The invention also includes combinations of GAS AI surface proteins. Combinations of GAS AI surface proteins may be selected from the same adhesin island or they may be selected from different GAS adhesin islands.

[0788] The invention comprises compositions comprising a first GAS AI protein and a second GAS AI protein wherein the first and second GAS AI proteins are derived from different GAS adhesin islands. For example, the invention includes a composition comprising at least two GAS AI proteins wherein the GAS AI proteins are encoded by the adhesin islands selected from the group consisting of GAS AI-1 and AI-2; GAS AI-1 and GAS AI-3; GAS AI-1 and GAS AI-4; GAS AI-2 and GAS AI-3; GAS AI-2 and GAS AI-4; and GAS AI-3 and GAS AI-4. Preferably the two GAS AI proteins are derived from different T-types.

[0789] A schematic arrangement of GAS Adhesin Island sequences is set forth in FIG. 162. In all strains, the AI region is flanked by the highly conserved open reading frames M1-123 and M1-136. Between three and five genes in each locus code for surface proteins containing LPXTG motifs. These surface proteins also all belong to the family of genes coding for ECM binding adhesins.

[0790] Adhesin island sequences can be identified in numerous M types of Group A Streptococcus. Examples of AI sequences within M1, M6, M3, M5, M12, M18, and M49 serotypes are discussed below.

[0791] GAS Adhesin Islands generally include a series of open reading frames within a GAS genome that encode for a collection of surface proteins and sortases. A GAS Adhesin Island may encode for amino acid sequences comprising at least one surface protein. Alternatively, a GAS Adhesin Island may encode for at least two surface proteins and at least one sortase. Preferably, a GAS Adhesin Island encodes for at least three surface proteins and at least two sortases. One or more of the surface proteins may include an LPXTG motif (such as LPXTG (SEQ ID NO: 122)) or other sortase substrate motif. One or more GAS AI surface proteins may participate in the formation of a pilus structure on the surface of the Gram positive bacteria.

[0792] GAS Adhesin Islands of the invention preferably include a divergently transcribed transcriptional regulator. The transcriptional regulator may regulate the expression of the GAS AI operon. Examples of transcriptional regulators found in GAS AI sequences include RofA and Nra.

[0793] The GAS AI surface proteins may bind or otherwise adhere to fibrinogen, fibronectin, or collagen. One or more of the GAS AI surface proteins may comprise a fimbrial structural subunit.

[symbol]

substrate motif. The LPXTG motif may be followed by a hydrophobic region and a charged C terminus, which are thought to retard the protein in the cell membrane to facilitate recognition by the membrane-localized sortase. See Barnett, et al., J. Bacteriology (2004) 186 (17): 5865-5875.

[0794] GAS AI sequences may be generally categorized as Type 1, Type 2, Type 3, or Type 4, depending on the number and type of sortase sequences within the island and the percentage identity of other proteins (with the exception of RofA and cpa) within the island. FIG. 167 provides a chart indicating the number and type of sortase sequences identified within the adhesin islands of various strains and serotypes of GAS. As can be seen in this figure, all GAS strains and serotypes thus far characterized as an AI-1 have a SrtB type sortase, all GAS strains and serotypes thus far characterized as an AI-2 have SrtB and SrtC1 type sortases, all GAS strains and serotypes thus far characterized as an AI-3 have a SrtC2 type sortase, and all GAS strains and serotypes thus far characterized as an AI-4 have SrtB and SrtC2 type sortases. A comparison of the percentage identity of sequences within the adhesin islands was presented in Table 45, see above.

[0795] (1) Adhesin Island Sequence within M6: GAS Adhesin Island 1 (“GAS AI-1”)

[0796] A GAS Adhesin Island within M6 serotype (MGAS10394) is outlined in Table 4 below. This GAS adhesin island 1 (“GAS AI-1”) comprises surface proteins, a srtB sortase and a rofA divergently transcribed transcriptional regulator.

[0797] GAS AI-1 surface proteins include Spy0157 (a fibronectin binding protein), Spy0159 (a collagen adhesion protein) and Spy0160 (a fimbrial structural subunit). Preferably, each of these GAS AI-1 surface proteins includes an LPXTG sortase substrate motif, such as LPXTG (SEQ ID NO: 122) or LPXSG (SEQ ID NO: 134) (conservative replacement of threonine with serine).

[0798] GAS AI-1 includes a srt type sortase. GAS srtB sortases may preferably anchor surface proteins with an LPSTG motif (SEQ ID NO: 166), particularly where the motif is followed by a serine.

TABLE 4
GAS AI-1 sequences from M6 isolate (MGAS10394)

| | Sortase substrate | |
|---|---|---|
| AI-1 sequence | sequence or sortase | |
| identifier | type | functional description |
| M6_Spy0156 | | Transcriptional regulator (rofA) |
| M6_Spy0157 | LPXTG | Fibronectin-binding protein |
| M6_Spy0158 | | Reverse transcriptase |
| M6_Spy0159 | LPXSG | Collagen adhesion protein |
| M6_Spy0160 | LPXTG | Fimbrial structural subunit |
| M6_Spy0161 | srtB | Sortase |

[0799] M6_Spy0160 appears to be present on the surface of GAS as part of oligomeric (pilus) structures. FIGS. 127-132 present electron micrographs of GAS serotype M6 strain 3650 immunogold stained for M6_Spy0160 using anti-M6_Spy0160 antiserum. Oligomeric or

[symbol]

GAS in each of these figures, indicating the presence of multiple M6_Spy0160 polypeptides in the oligomeric or hyperoligomeric structures. FIG. 176 A-F present electron micrographs of GAS M6 strain 2724 immunogold stained for M6_Spy0160 using anti-M6_Spy0160 antiserum (FIGS. 176 A-E) or immunogold stained for M6_Spy0159 using anti-M6_Spy0159 antiserum (FIG. 176 F). Oligomeric or hyperoligomeric structures labelled with gold particles can again be seen extending from the surface of the M6 strain 2724 GAS bacteria immunogold stained for M6_Spy0160. M6_Spy0159 is also detected on the surface of the M6 strain 2724 GAS.

[0800] FACS analysis has confirmed that the GAS AI-1 surface proteins spyM6_{—}0159 and spyM6_{—}0160 are indeed expressed on the surface of GAS. FIG. 73 provides the results of FACS analysis for surface expression of spyM6_{—}0159 on each of GAS serotypes M6 2724, M6 3650, and M6 2894. A shift in fluorescence is observed for each GAS serotype when anti-spyM6_{—}0159 antiserum is present, demonstrating cell surface expression. Table 18, below, quantitatively summarizes the FACS fluorescence values obtained for each GAS serotype in the presence of pre-immune antiserum, anti-spyM6_{—}0159 antiserum, and the difference in fluorescence value between the pre-immune and anti-spyM6_{—}0159 antiserum.

TABLE 18
Summary of FACS values for surface expression of spyM6_0159

| 2724 | | | 3650 | | | 2894 | | |
|---|---|---|---|---|---|---|---|---|
| Pre- | Anti- | | Pre- | Anti- | | Pre- | Anti- | |
| immune | spyM6_0159 | Change | immune | spyM6_0159 | Change | immune | spyM6_0159 | Change |
| 134.84 | 427.48 | 293 | 149.68 | 712.62 | 563 | 193.86 | 597.8 | 404 |

[0801] FIG. 74 provides the results of FACS analysis for surface expression of spyM6_{—}0160 on each of GAS serotypes M6 2724, M6 3650, and M6 2894. In the presence of anti-spyM6_{—}0160 antiserum, a shift in fluorescence is observed for each GAS serotype, which demonstrates its cell surface expression. Table 19, below, quantitatively summarizes the FACS fluorescence values obtained for each GAS serotype in the presence of pre-immune antiserum, anti-spyM6_{—}0160 antiserum, and the change in fluorescence value between the pre-immune and anti-spyM6_{—}0160 antiserum.

TABLE 19
Summary of FACS values for surface expression of spyM6_0160

| 2724 | | | 3650 | | | 2894 | | |
|---|---|---|---|---|---|---|---|---|
| Pre- | Anti- | | Pre- | Anti- | | Pre- | Anti- | |
| immune | spyM6_0160 | change | immune | spyM6_0160 | change | immune | spyM6_0160 | change |
| 117.12 | 443.24 | 326 | 128.57 | 776.39 | 648 | 125.87 | 621.17 | 495 |

[0802] Surface expression of M6_Spy0159 and M6_Spy0160 on M6 serotype GAS has also been confirmed by Western blot analysis. FIG. 98 shows that while pre-immune sera (Pα-0159) does not detect expression of M6_Spy0159 in GAS serotype M6, anti-M6_Spy0159 immune sera (Iα-0159) is able to detect M6_Spy0159 protein in both total GAS M6 extracts (M6 tot) and GAS M6 fractions enriched for cell surface proteins (M6 surf prot). The M6_Spy0159 proteins detected in the

[symbol]

molecular weight structures, indicating that M6_Spy0159 may be in an oligomeric (pilus) form.

[0803] FIG. 112 shows that while preimmune sera (Preimmune Anti 106) does not detect expression of M6_Spy0160 in GAS serotype M6 strain 2724, anti-M6_Spy0160 immune sera (Anti 160) does in both total GAS M6 strain 2724 extracts (M6 2724 tot) and GAS M6 strain 2724 fractions enriched for surface proteins. The M6_Spy0160 proteins detected in the total GAS M6 strain 2724 extracts or the GAS M6 strain 2724 extracts enriched for surface proteins are also present as high molecular weight structures, indicating that M6_Spy0160 may be in an oligomeric (pilus) form.

[0804] FIGS. 110 and 111 both further verify the presence of M6_Spy0159 and M6_Spy0160 in higher molecular weight structures on the surface of GAS. FIG. 110 provides a Western blot performed to detect M6_Spy0159 and M6_Spy0160 in GAS M6 strain 2724 extracts enriched for surface proteins. Antiserum raised against either M6_Spy0159 (Anti-159) or M6_Spy0160 (Anti-160) cross-hybridizes with high molecular weight structures (pili) in these extracts. FIG. 111 provides a similar Western blot that verifies the presence of M6_Spy0159 and M6_Spy0160 in high molecular weight structures in GAS M6 strain 3650 extracts enriched for surface proteins.

[0805] SpyM6_{—}0157 (a fibronectin-binding protein) may also be expressed on the surface of GAS serotype M6 bacteria. FIG. 174 shows the results of FACS analysis for surface expression of spyM6_{—}0157 on M6 strain 3650. A slight shift in fluorescence is observed, which demonstrates that some spyM6_{—}0157 may be expressed on the GAS cell surface.

Adhesin Island Sequence within M6: GAS Adhesin Island 2 (“GAS AI-2”)

[0806] A GAS Adhesin Island within M1 serotype (SF370) is outlined in Table 5 below. This GAS adhesin island 2 (“GAS AI-2”) comprises surface proteins, a SrtB sortase, a SrtC1 sortase and a RofA divergently transcribed transcriptional regulator.

[0807] GAS AI-2 surface proteins include GAS 15 (Cpa), Spy0128 (thought to be a fimbrial protein) and Spy0130 (a hypothetical protein). Preferably, each of these GAS AI-2 surface proteins includes an LPXTG sortase substrate motif, such as LPXTG (SEQ ID NO: 122), VVXTG (SEQ ID NO: 135), or EVXTG (SEQ ID NO: 136).

[0808] GAS AI-2 includes a srtB type sortase and a srtC1 sortase. As discussed above, GAS SrtB sortases may preferably anchor surface proteins with an LPSTG (SEQ ID NO: 166) motif, particularly where the motif is followed by a serine. GAS SrtC1 sortase may preferentially anchor surface proteins with a V(P/V)PTG (SEQ ID NO: 167) motif. GAS SrtC1 may be differentially regulated by RofA.

[0809] GAS AI-2 may also include a LepA putative signal peptidase I protein.

TABLE 5
GAS AI-2 sequence from M1 isolate (SF370)

| | Sortase | |
|---|---|---|
| | substrate | |
| AI-2 sequence | sequence or | |
| identifier | sortase type | functional description |
| SPy0124 | | rofA regulatory protein |
| GAS15 | VVXTG | cpa |
| (not annotated in SF370) | | |
| SPy0127 | | LepA putative signal peptidase I |
| SPy0128 (GAS16) | EVXTG | hypothetical protein (fimbrial) |
| SPy0129 (GAS17) | srtC1 | sortase |
| SPy0130 (GAS18) | LPXTG | hypothetical protein |
| SPy0131 | | conserved hypothetical protein |
| SPy0133 | | conserved hypothetical protein |
| SPy0135 (GAS20) | srtB | sortase (putative fimbrial- |
| | | associated protein) |

[0810] GAS 15, GAS 16, and GAS 18 appear to be present on the surface of GAS as part of oligomeric (pilus) structures. FIGS. 113-115 present electron micrographs of GAS serotype M1 strain SF370 immunogold stained for GAS 15 using anti-GAS 15 antiserum. FIGS. 116-121 provide electron micrographs of GAS serotype M1 strain SF370 immunogold stained for GAS 16 using anti-GAS 16 antiserum. FIGS. 122-125 present electron micrograph of GAS serotype M1 strain SF370 immunogold stained for GAS 18 using anti-GAS 18 antiserum. Oligomers of these proteins can be seen on the surface of SF370 bacteria in the immuno-gold stained micrographs.

[0811] FIG. 126 reveals a hyperoligomer on the surface of a GAS serotype M1 strain SF370 bacterium immunogold stained for GAS 18. This long hyperogliomeric structure comprising GAS 18 stretches far out into the supernatant from the surface of the bacteria.

[0812] FACS analysis has confirmed that the GAS AI-2 surface proteins GAS 15, GAS 16, and GAS 18 are expressed on the surface of GAS. FIG. 75 provides the results of FACS analysis for surface expression of GAS 15 on each of GAS serotypes M1 2719, M1 2580, M1 3280, M1 SF370, M1 2913, and M1 3348. A shift in fluorescence is observed for each GAS serotype when anti-GAS 15 antiserum is present, demonstrating cell surface expression. Table 20, below, quantitatively summarizes the FACS fluorescence values obtained for each GAS serotype in the presence of pre-immune antiserum, anti-GAS 15 antiserum, and the difference in fluorescence value between the pre-immune and anti-GAS 15 antiserum.

TABLE 20
Summary of FACS values for surface expression of GAS 15

| Pre- | Anti-GAS | | Pre- | Anti-GAS | | Pre- | Anti-GAS | |
|---|---|---|---|---|---|---|---|---|
| immune | 15 | Change | immune | 15 | Change | immune | 15 | Change |
| 2719 | | | 2580 | | | 3280 | | |
| 159.46 | 712.71 | 553 | 123.9 | 682.84 | 559 | 217.02 | 639.69 | 423 |
| SF370 | | | 2913 | | | 3348 | | |
| 201.93 | 722.68 | 521 | 121.41 | 600.45 | 479 | 152.09 | 446.41 | 294 |

[0813] FIGS. 76 and 79 provide the results of FACS analysis for surface expression of GAS 16 on each of GAS serotypes M1 2719, M1 2580, M1 3280, M1 SF370, M1 2913, and M1 3348. The FACS data in FIG. 76 was obtained using antisera was raised against full length GAS 16. In the presence of this anti-GAS 16 antiserum, a shift in fluorescence is observed for each GAS serotype,

[symbol]

fluorescence values obtained for each GAS serotype in the presence of pre-immune antiserum, anti-GAS 16 antiserum, and the change in fluorescence value between the pre-immune and anti-GAS 16 antiserum.

TABLE 21
Summary of FACS values for surface expression of GAS 16

| Pre- | Anti-GAS | | Pre- | Anti-GAS | | Pre- | Anti-GAS | |
|---|---|---|---|---|---|---|---|---|
| immune | 16 | Change | immune | 16 | Change | immune | 16 | Change |
| 2719 | | | 2580 | | | 3280 | | |
| 233.27 | 690.09 | 457 | 133.82 | 732.29 | 598 | 264.47 | 649.43 | 385 |
| SF370 | | | 2913 | | | 3348 | | |
| 237.2 | 727.46 | 490 | 138.52 | 588.04 | 450 | 180.56 | 420.93 | 240 |

[0814] The FACS data in FIG. 79 was obtained using antisera was raised against a truncated GAS 16, which is encoded by SEQ ID NO: 179, shown below.

SEQ ID NO: 179:
GCTACAACAGTTCACGGGGAGACTGTTGTAAACGGAGCCAAACTAACAGTTACAAAAAACCTTGATTTAGTTAAT
AGCAATGCATTAATTCCAAATACAGATTTTACATTTAAAATCGAACCTGATACTACTGTCAACGAAGACGGAAAT
AAGTTTAAAGGTGTAGCTTTGAACACACCGATGACTAAAGTCACTTACACCAATTCAGATAAAGGTGGATCAAAT
ACGAAAACTGCAGAATTTGATTTTTCAGAAGTTACTTTTGAAAAACCAGGTGTTTATTATTACAAAGTAACTGAG
GAGAAGATAGATAAAGTTCCTGGTGTTTCTTATGATACAACATCTTACACTGTTCAAGTTCATGTCTTGTGGAAT
GAAGAGCAACAAAAACCAGTAGCTACTTATATTGTTGGTTATAAAGAAGGTAGTAAGGTGCCAATTCAGTTCAAA
AATAGCTTAGATTCTACTACATTAACGGTGAAGAAAAAAGTTTCAGGTACCGGTGGAGATCGCTCTAAAGATTTT
AATTTTGGTCTGACTTTAAAAGCAAATCAGTATTATAAGGCGTCAGAAAAAGTCATGATTGAGAAGACAACTAAA
GGTGGTCAAGCTCCTGTTCAAACAGAGGCTAGTATAGATCAACTCTATCATTTTACCTTGAAAGATGGTGAATCA
ATCAAAGTCACAAATCTTCCAGTAGGTGTGGATTATGTTGTCACTGAAGACGATTACAAATCAGAAAAATATACA
ACCAACGTGGAAGTTAGTCCTCAAGATGGAGCTGTAAAAAATATCGCAGGTAATTCAACTGAACAAGAGACATCT
ACTGATAAAGATATGACCATTACTTTTACAAATAAAAAAGATTT

In the presence of this anti-GAS 16 antiserum, a shift in fluorescence is observed for each GAS serotype, demonstrating its cell surface expression. Table 22, below, quantitatively summarizes the FACS fluorescence values obtained for each GAS serotype in the presence of pre-immune antiserum, anti-GAS 16 antiserum, and the change in fluorescence value between the pre-immune and anti-GAS 16 antiserum.

TABLE 22
Summary of FACS values for surface expression of GAS 16 using a second antisera

| Pre- | Anti-GAS | | Pre- | Anti-GAS | | Pre- | Anti-GAS | |
|---|---|---|---|---|---|---|---|---|
| immune | 16 | Change | immune | 16 | Change | immune | 16 | Change |
| 2719 | | | 2580 | | | 3280 | | |
| 141.55 | 650.22 | 509 | 119.57 | 672.35 | 553 | 209.18 | 666.71 | 458 |
| SF370 | | | 2913 | | | 3348 | | |
| 159.92 | 719.32 | 559 | 115.97 | 585.9 | 470 | 146.1 | 414.01 | 268 |

[symbol]

each of GAS serotypes M1 2719, M1 2580, M1 3280, M1 SF370, M1 2913, and M1 3348. The antiserum used to obtain the FACS data in each of FIGS. 77 and 78 was different, although each was raised against full length GAS 18. In the presence of each of the anti-GAS 18 antisera, a shift in fluorescence is observed for each GAS serotype, demonstrating its cell surface expression. Tables 23 and 24, below, quantitatively summarizes the FACS fluorescence values obtained for each GAS serotype in the presence of pre-immune antiserum, first or second anti-GAS 18 antiserum, and the change in fluorescence value between the pre-immune and first or second anti-GAS 18 antiserum.

TABLE 23
Summary of FACS values for surface expression of GAS 18

| Pre- | Anti-GAS | | Pre- | Anti-GAS | | Pre- | Anti-GAS | |
|---|---|---|---|---|---|---|---|---|
| immune | 18 | Change | immune | 18 | Change | immune | 18 | Change |
| 2719 | | | 2580 | | | 3280 | | |
| 135.68 | 327.98 | 192 | 116.32 | 379.41 | 263 | 208.12 | 380.84 | 173 |
| SF370 | | | 2913 | | | 3348 | | |
| 185.39 | 438.23 | 253 | 119.95 | 373.32 | 253 | 147.12 | 266.51 | 119 |

TABLE 24
Summary of FACS values for surface expression of GAS 18 using a second antisera

| Pre- | Anti-GAS | | Pre- | Anti-GAS | | Pre- | Anti-GAS | |
|---|---|---|---|---|---|---|---|---|
| immune | 18 | Change | immune | 18 | Change | immune | 18 | Change |
| 2719 | | | 2580 | | | 3280 | | |
| 150.4 | 250.39 | 100 | 139.18 | 386.38 | 247 | 253.38 | 347.72 | 94 |
| SF370 | | | 2913 | | | 3348 | | |
| 188.64 | 373.11 | 184 | 124.94 | 384.82 | 260 | 168.8 | 213.65 | 45 |

[0815] Surface expression of GAS 15, GAS 16, and GAS 18 on M1 serotype GAS has also been confirmed by Western blot analysis. FIG. 89 shows that while pre-immune sera does not detect GAS M1 expression of GAS 15, anti-GAS 15 immune sera is able to detect GAS 15 protein in both total GAS M1 extracts and GAS M1 proteins enriched for cell surface proteins. The GAS15 proteins detected in the M1 extracts enriched for surface proteins are also present as high molecular weight structures, indicating that GAS 15 may be in an oligomeric (pilus) form. FIG. 90 also shows the results of Western blot analysis of M1 serotype GAS using anti-GAS 15 antisera. Again, the lanes that contain GAS M1 extracts enriched for surface proteins (M1 prot sup) show the presence of high molecular weight structures that may be oligomers of GAS 15. FIG. 91 provides an additional Western blot identical to that of FIG. 90, but that was probed with preimmune sera. As expected, no proteins were detected on this membrane.

[0816] FIG. 92 provides a Western blot that was probed for GAS 16 protein. While pre-immune sera does not detect GAS M1 expression of GAS 16, anti-GAS 16 immune sera is able to detect GAS

[symbol]

the M1 extracts enriched for surface proteins are present as high molecular weight structures, indicating that GAS 16 may be in an oligomeric (pilus) form. FIG. 93 also shows the results of Western blot analysis of M1 serotype GAS using anti-GAS 16 antisera. The lanes that contain total GAS M1 protein (M1 tot new and M1 tot old) and the lane that contains GAS M1 extracts enriched for surface proteins (M1 prot sup) show the presence of high molecular weight structures that may be oligomers of GAS 16. FIG. 94 provides an additional Western blot identical to that of FIG. 93, but that was probed with pre-immune sera. As expected, no proteins were detected on this membrane.

[0817] FIG. 95 provides a Western blot that was probed for GAS 18 protein. While pre-immune sera does not detect GAS M1 expression of GAS 18, anti-GAS 18 immune sera is able to detect GAS 18 protein in GAS M1 extracts enriched for cell surface proteins. The GAS 18 proteins detected in the M1 extracts enriched for surface proteins are present as high molecular weight structures, indicating that GAS 18 may be in an oligomeric (pilus) form. FIG. 96 also shows the results of Western blot analysis of M1 serotype GAS using anti-GAS 18 antisera. The lane that contains GAS M1 extracts enriched for surface proteins (M1 prot sup) show the presence of high molecular weight structures that may be oligomers of GAS 18. FIG. 97 provides an additional Western blot identical to that of FIG. 96, but that was probed with pre-immune sera. As expected, no proteins were detected on this membrane.

[0818] FIGS. 102-106 provide additional Western blots to verify the presence of GAS 15, GAS 16, and GAS 18 in high molecular weight structures in GAS. Each Western blot was performed using proteins from a different GAS M1 strain, 2580, 2913, 3280, 3348, and 2719. Each Western blot was probed with antisera raised against each of GAS 15, GAS 16, and GAS 18. As can be seen in FIGS. 102-106, none of the Western blots shows detection of proteins using pre-immune serum (Pα-158, Pα-15, Pα-16, or Pα-18), while each Western blot shows cross-hybridization of the GAS 15 (Iα-15), GAS 16 (Iα-16), and GAS 18 (Iα-18) antisera to high molecular weight structures. Thus, these Western blots confirm that GAS 15, GAS 16, and GAS 18 can be present in pili in GAS M1.

[0819] FIG. 107 provides a similar Western blot performed to detect GAS 15, GAS 16, and GAS 18 proteins in a GAS serotype M1 strain SF370 protein fraction enriched for surface proteins. This Western blot also shows detection of GAS 15 (Anti-15), GAS 16 (Anti-16), and GAS 18 (Anti-18) as high molecular weight structures.

[0820] (3) Adhesin Island Sequence within M3, M5, and M18: GAS Adhesin Island 3 (“GAS AI-3”)

[0821] GAS Adhesin Island sequences within M3, M5, and M18 serotypes are outlined in Tables 6-8 and 10 below. This GAS adhesin island 3 (“GAS AI-3”) comprises surface proteins, a SrtC2 sortase, and a Negative transcriptional regulator (Nra) divergently transcribed transcriptional regulator.

[0822] GAS AI-3 surface proteins within include a collagen binding protein, a fimbrial protein, a F2 like fibronectin-binding protein. GAS AI-3 surface proteins may also include a hypothetical surface

[symbol]

motif, such as LPXTG (SEQ ID NO: 122), VPXTG (SEQ ID NO: 137), QVXTG (SEQ ID NO: 138) or LPXAG (SEQ ID NO: 139).

[0823] GAS AI-3 includes a SrtC2 type sortase. GAS SrtC2 type sortases may preferably anchor surface proteins with a QVPTG (SEQ ID NO: 140) motif, particularly when the motif is followed by a hydrophobic region and a charged C terminus tail. GAS SrtC2 may be differentially regulated by Nra.

[0824] GAS AI-3 may also include a LepA putative signal peptidase I protein.

[0825] GAS AI-3 may also include a putative multiple sugar metabolism regulator.

TABLE 6
GAS AI-3 sequences from M3 isolate (MGAS315)

| | Sortase | |
|---|---|---|
| | substrate | |
| AI-3 sequence | sequence or | |
| identifier | sortase type | functional description |
| SpyM3_0097 | | Negative transcriptional regulator (Nra) |
| SpyM3_0098 | VPXTG | putative collagen binding protein (Cpb) |
| SpyM3_0099 | | LepA putative signal peptidase I |
| SpyM3_0100 | QVXTG | conserved hypothetical protein (fimbrial) |
| SpyM3_0101 | SrtC2 | sortase |
| SpyM3_0102 | LPXAG | hypothetical protein |
| SpyM3_0103 | | putative multiple sugar metabolism |
| | | regulator |
| SpyM3_0104 | LPXTG | protein F2 like fibronectin-binding protein |

TABLE 7
GAS AI-3 sequence from M3 isolate (SSI-1)

| | Sortase | |
|---|---|---|
| | Substrate | |
| AI-3 sequence | sequence or | |
| identifier | sortase type | functional description |
| SPs0099 | | Negative transcriptional regulator (Nra) |
| SPs0100 | VPXTG | putative collagen binding protein (Cpb) |
| SPs0101 | | LepA putative signal peptidase I |
| SPs0102 | QVXTG | conserved hypothetical protein (fimbrial) |
| SPs0103 | SrtC2 | sortase |
| SPs0104 | LPXAG | hypothetical protein |
| SPs0105 | | putative multiple sugar metabolism |
| | | regulator |
| SPs0106 | LPXTG | protein F2 like fibronectin-binding protein |

TABLE 10
GAS AI-3 sequences from M5 isolate (Manfredo)

| | Sortase | |
|---|---|---|
| AI-3 | substrate | |
| sequence | sequence or | |
| identifier | sortase type | Functional description |
| orf77 | | Negative transcriptional regulator (Nra) |
| orf78 | VPXTG | putative collagen binding protein (Cpb) |
| orf79 | | LepA putative signal peptidase I |
| orf80 | QVXTG | conserved hypothetical protein (fimbrial) |
| orf81 | SrtC2 | sortase |
| orf82 | LPXAG | hypothetical protein |
| orf83 | | putative multiple sugar metabolism regulator |
| orf84 | LPXTG | protein F2 like fibronectin-binding protein |

TABLE 8
GAS AI-3 sequences from M18 isolate (MGAS8232)

| | Sortase | |
|---|---|---|
| | substrate | |
| AI-3 | sequence | |
| sequence | or sortase | |
| identifier | type | Functional description |
| spyM18_0125 | | Negative transcriptional regulator (Nra) |
| | | (N-terminal fragment) |
| spyM18_0126 | VPXTG | putative collagen binding protein (Cpb) |
| spyM18_0127 | | LepA putative signal peptidase I |
| spyM18_0128 | QVXTG | conserved hypothetical protein (fimbrial) |
| spyM18_0129 | SrtC2 | sortase |
| spyM18_0130 | LPXAG | hypothetical protein |
| spyM18_0131 | | putative multiple sugar metabolism regulator |
| spyM18_0132 | LPXTG | protein F2 like fibronectin-binding protein |

TABLE 44
GAS AI-3 sequences from M49 isolate (591)

| | Sortase | |
|---|---|---|
| | substrate | |
| | sequence | |
| AI-3 sequence | or sortase | |
| identifier | type | Functional description |
| SpyoM01000156 | | Negative transcriptional regulator (Nra) |
| SpyoM01000155 | VPXTG | collagen binding protein (Cpa) |
| SpyoM01000154 | | LepA putative signal peptidase I |
| SpyoM01000153 | QVXTG | conserved hypothetical protein (fimbrial) |
| SpyoM01000152 | SrtC2 | sortase |
| SpyoM01000151 | LPXAG | hypothetical protein |
| SpyoM01000150 | | MsmRL |
| SpyoM01000149 | LPXTG | protein F2 like fibronectin-binding protein |

[0826] A schematic of AI-3 serotypes M3, M5, M18, and M49 is shown in FIG. 51A. Each contains an open reading frame encoding a SrtC2-type sortase of nearly identical amino acid sequence. See FIG. 52B for an amino acid sequence alignment for each of the SrtC2 amino acid sequences.

[0827] The protein F2-like fibronectin-binding protein of each these type 3 adhesin islands contains a pilin motif and an E-box. FIG. 60 indicates the amino acid sequence of the pilin motif and E-box of each of GAS AI-3 serotype M3 MGAS315 (SpyM3_{—}0104/21909640), GAS AI-3 serotype M3 SSI (Sps0106/28895018), GAS AI-3 serotype M18 (SpyM18_{—}0132/19745307), and GASAI-3 serotype M5 (orf84).

[0828] FACS analysis has confirmed that the GAS AI-3 surface proteins SpyM3_{—}0098, SpyM3_{—}010, SpyM3_{—}0102, and SpyM3_{—}0104 are expressed on the surface of GAS. FIG. 80 provides the results of FACS analysis for surface expression of SpyM3_{—}0098 on each of GAS

[symbol]

anti-SpyM3_{—}0098 antiserum is present, demonstrating cell surface expression. Table 25, below, quantitatively summarizes the FACS fluorescence values obtained for each GAS serotype in the presence of pre-immune antiserum, anti-SpyM3_{—}0098 antiserum, and the difference in fluorescence value between the pre-immune and anti-SpyM3_{—}0098 antiserum.

TABLE 25
Summary of FACS values for surface expression of SpyM3_0098

| 2721 | | | 3135 | | |
|---|---|---|---|---|---|
| Pre- | Anti- | | Pre- | Anti- | |
| immune | spyM3_0098 | Change | immune | spyM3_0098 | Change |
| 117.85 | 249.51 | 132 | 99.17 | 277.21 | 178 |

[0829] FIG. 81 provides the results of FACS analysis for surface expression of SpyM3_{—}0100 on each of GAS serotypes M3 2721 and M3 3135. A shift in fluorescence is observed for each GAS serotype when anti-SpyM3_{—}0100 antiserum is present, demonstrating cell surface expression. Table 26, below, quantitatively summarizes the FACS fluorescence values obtained for each GAS serotype in the presence of pre-immune antiserum, anti-SpyM3_{—}0100 antiserum, and the difference in fluorescence value between the pre-immune and anti-SpyM3_{—}0100 antiserum.

TABLE 26
Summary of FACS values for surface expression of SpyM3_0100

| 2721 | | | 3135 | | |
|---|---|---|---|---|---|
| Pre- | Anti- | | Pre- | Anti- | |
| immune | spyM3_0100 | Change | immune | spyM3_0100 | Change |
| 110.31 | 181.91 | 72 | 97.87 | 250.01 | 152 |

[0830] FIG. 82 provides the results of FACS analysis for surface expression of SpyM3_{—}0102 on each of GAS serotypes M3 2721 and M3 3135. A shift in fluorescence is observed for each GAS serotype when anti-SpyM3_{—}0102 antiserum is present, demonstrating cell surface expression. Table 27, below, quantitatively summarizes the FACS fluorescence values obtained for each GAS serotype in the presence of pre-immune antiserum, anti-SpyM3_{—}0102 antiserum, and the difference in fluorescence value between the pre-immune and anti-SpyM3_{—}0102 antiserum.

TABLE 27
Summary of FACS values for surface expression of SpyM3_0102
in M3 serotypes

| 2721 | | | 3135 | | |
|---|---|---|---|---|---|
| Pre- | Anti- | | Pre- | Anti- | |
| immune | spyM3_0102 | Change | immune | spyM3_0102 | Change |
| 109.86 | 155.26 | 45 | 100.02 | 112.58 | 13 |

[0831] FIG. 82 also provides the results of FACS analysis for surface expression of a pilin antigen that has homology to SpyM3_{—}0102 identified in a different GAS serotype, M6. FACS analysis conducted with the SpyM3_{—}0102 antisera was able to detect surface expression of the homologous SpyM3_{—}0102 antigen on each of GAS serotypes M6 2724, M6 3650, and M6 2894. Table 28, below, quantitatively summarizes the FACS fluorescence values obtained for each GAS serotype in the presence of pre-immune antiserum, anti-SpyM3_{—}0102 antiserum, and the difference in fluorescence value between the pre-immune and anti-SpyM3_{—}0102 antiserum.

TABLE 28
Summary of FACS values for surface expression of SpyM3_0102
in M6 serotypes

| 2724 | | | 3650 | | | 2894 | | |
|---|---|---|---|---|---|---|---|---|
| Pre- | Anti- | | Pre- | Anti- | | Pre- | Anti- | |
| immune | spyM3_0102 | Change | immune | spyM3_0102 | Change | immune | spyM3_0102 | Change |
| 146.59 | 254.03 | 107 | 162.56 | 294.03 | 131 | 175.49 | 313.69 | 138 |

[0832] SpyM3_{—}0102 is also homologous to pilin antigen 19224139 of GAS serotype M12. Antisera raised against SpyM3_{—}0102 is able to detect high molecular weight structures in GAS serotype M12 strain 2728 protein fractions enriched for surface proteins, which would contain the 19224139 antigen. See FIG. 109 at the lane labelled M12 2728 surf prot.

[0833] FIG. 83 provides the results of FACS analysis for surface expression of SpyM3_{—}0104 on each of GAS serotypes M3 2721 and M3 3135. A shift in fluorescence is observed for each GAS serotype when anti-SpyM3_{—}0104 antiserum is present, demonstrating cell surface expression. Table 29, below, quantitatively summarizes the FACS fluorescence values obtained for each GAS serotype in the presence of pre-immune antiserum, anti-SpyM3_{—}0104 antiserum, and the difference in fluorescence value between the pre-immune and anti-SpyM3_{—}0104 antiserum.

TABLE 29
Summary of FACS values for surface expression of SpyM3_0104
in M3 serotypes

| 2721 | | | 3135 | | |
|---|---|---|---|---|---|
| Pre- | Anti- | | Pre- | Anti- | |
| immune | spyM3_0104 | Change | immune | spyM3_0104 | Change |
| 128.45 | 351.65 | 223 | 105.1 | 339.88 | 235 |

[0834] FIG. 83 also provides the results of FACS analysis for surface expression of a pilin antigen that has homology to SpyM3_{—}0104 identified in a different GAS serotype, M12. FACS analysis conducted with the SpyM3_{—}0104 antisera was able to detect surface expression of the homologous SpyM3_{—}0104 antigen on GAS serotype M12 2728. Table 30, below, quantitatively summarizes the FACS fluorescence values obtained for this GAS serotype in the presence of pre-immune antiserum, anti-SpyM3_{—}0104 antiserum, and the difference in fluorescence value between the pre-immune and anti-SpyM3_{—}0104 antiserum.

TABLE 30
Summary of FACS values for surface expression of
SpyM3_0104 in an M12 serotype
2728

| Pre-immune | Anti-spyM3_0104 | Change |
|---|---|---|
| 198.57 | 288.75 | 90 |

[0835] FIG. 84 provides the results of FACS analysis for surface expression of SPs_{—}0106 on each of GAS serotypes M3 2721 and M3 3135. A shift in fluorescence is observed for each GAS serotype when anti-SPs_{—}0106 antiserum is present, demonstrating cell surface expression. Table 31, below, quantitatively summarizes the FACS fluorescence values obtained for each GAS serotype in the presence of pre-immune antiserum, anti-SPs_{—}0106 antiserum, and the difference in fluorescence value between the pre-immune and anti-SPs_{—}0106 antiserum.

TABLE 31
Summary of FACS values for surface expression of SPs_0106
in M3 serotypes

| 2721 | | | 3135 | | |
|---|---|---|---|---|---|
| Pre- | | | Pre- | | |
| immune | Anti-SPs_0106 | Change | immune | Anti-SPs_0106 | Change |
| 116 | 463.28 | 347 | 103.02 | 494.27 | 391 |

[0836] FIG. 84 also provides the results of FACS analysis for surface expression of a pilin antigen that has homology to SPs_{—}0106 identified in a different GAS serotype, M12. FACS analysis

[symbol]

SPs_{—}0106 antigen on GAS serotype M12 2728. Table 32, below, quantitatively summarizes the FACS fluorescence values obtained for each GAS serotype in the presence of pre-immune antiserum, anti-SPs_{—}0106 antiserum, and the difference in fluorescence value between the pre-immune and anti-SPs_{—}0106 antiserum.

TABLE 32
Summary of FACS values for surface expression of
SPs_0106 in an M12 serotype
2728

| Pre-immune | Anti-SPs_0106 | Change |
|---|---|---|
| 304.01 | 254.64 | −49 |

[0837] (4) Adhesin Island Sequence within M12: GAS Adhesin Island 4 (“GAS AI-4”)

[0838] GAS Adhesin Island sequences within M12 serotype are outlined in Table 11 below. This GAS adhesin island 4 (“GAS AI-4”) comprises surface proteins, a SrtC2 sortase, and a RofA regulatory protein.

[0839] GAS AI-4 surface proteins within may include a fimbrial protein, an F or P2 like fibronectin-binding protein, and a capsular polysaccharide adhesion protein (Cpa). GAS AI-4 surface proteins may also include a hypothetical surface protein in an open reading frame (orf). Preferably, each of these GAS AI-4 surface proteins include an LPXTG sortase substrate motif, such as LPXTG (SEQ ID NO: 122), VPXTG (SEQ ID NO: 137), QVXTG (SEQ ID NO: 138) or LPXAG (SEQ ID NO: 139).

[0840] GAS AI-4 includes a SrtC2 type sortase. GAS SrtC2 type sortases may preferably anchor surface proteins with a QVPTG (SEQ ID NO: 140) motif, particularly when the motif is followed by a hydrophobic region and a charged C terminus tail.

[0841] GAS AI-4 may also include a LepA putative signal peptidase I protein and a MsmRL protein.

TABLE 11
GAS AI-4 sequences from M12 isolate (A735)

| AI-4 | Sortase substrate | |
|---|---|---|
| sequence | sequence or sortase | |
| identifier | type | Functional description |
| 19224133 | | RofA regulatory protein |
| 19224134 | LPXTG | protein F |
| | SrtB | SrtB (stop codon*) |
| 19224135 | VPXTG | Cpa |
| 19224136 | | LepA |
| 19224137 | QVXTG | EftLSL.A (fimbrial) |
| 19224138 | SrtC2 | EftLSL.B |
| 19224139 | LPXAG | Orf2 |
| 19224140 | | MsmRL |
| 19224141 | LPXTG | protein F2 |

[0842] A schematic of AI-4 serotype M12 is shown in FIG. 51A.

[0843] One of the open reading frames encodes a SrtC2-type sortase having an amino acid sequence nearly identical to the amino acid sequence of the SrtC2-type sortase of the AI-3 serotypes described

[symbol]

sequences.

[0844] Other proteins encoded by the open reading frames of the AI-4 serotype M12 are homologous to proteins encoded by other known adhesin islands in S. pyogenes, as well as the GAS AI-3 serotype M5 (Manfredo). FIG. 52 is an amino acid alignment of the capsular polysaccharide adhesion protein (cpa) of AI-4 serotype M12 (19224135), GAS AI-3 serotype M5 (ORF78), S. pyogenes strain MGAS315 serotype M3 (21909634), S. pyogenes SSI-1 serotype M3 (28810257), S. pyogenes MGAS8232 serotype M3 (19745301), and GAS AI-2 serotype M1 (GAS15). The amino acid sequence of the AI-4 serotype M12 cpa shares a high degree of homology with other cpa proteins.

[0845] FIG. 53 shows that the F-like fibronectin-binding protein encoded by the AI-4 serotype M12 open reading frame (19224134) shares homology with a F-like fibronectin-binding protein found in S. pyogenes strain MGAS10394 serotype M6 (50913503).

[0846] FIG. 54 is an amino acid sequence alignment that illustrates that the F2-like fibronectin-binding protein of AI-4 serotype M12 (19224141) shares homology with the F2-like fibronectin-binding protein of S. pyogenes strain MGAS8232 serotype M3 (19745307), GAS AI-3 serotype M5 (ORF84), S. pyogenes strain SSI serotype M3 (28810263), and S. pyogenes strain MGAS315 serotype M3 (21909640).

[0847] FIG. 55 is an amino acid sequence alignment that illustrates that the fimbrial protein of AI-4 serotype M12 (19224137) shares homology with the fimbrial protein of GAS AI-3 serotype M5 (ORF80), and the hypothetical protein of S. pyogenes strain MGAS315 serotype M3 (21909636), S. pyogenes strain SSI serotype M3 (28810259), S. pyogenes strain MGAS8732 serotype M3 (19745303), and S. pyogenes strain M1 GAS serotype M1 (13621428).

[0848] FIG. 56 is an amino acid sequence alignment that illustrates that the hypothetical protein of GAS AI-4 serotype M12 (19224139) shares homology with the hypothetical protein of S. pyogenes strain MGAS315 serotype M3 (21909638), S. pyogenes strain SSI-1 serotype M3 (28810261), GAS AI-3 serotype M5 (ORF82), and S. pyogenes strain MGAS8232 serotype M3 (19745305).

[0849] The protein F2-like fibronectin-binding protein of the type 4 adhesin island also contains a highly conserved pilin motif and an E-box. FIG. 60 indicates the amino acid sequence of the pilin motif and E-box in AI-4 serotype M12.

[0850] FACS analysis has confirmed that the GAS AI-4 surface proteins 19224134, 19224135, 19224137, and 19224141 are expressed on the surface of GAS. FIG. 85 provides the results of FACS analysis for surface expression of 19224134 on GAS serotype M12 2728. A shift in fluorescence is observed when anti-19224134 antiserum is present, demonstrating cell surface expression. Table 33, below, quantitatively summarizes the FACS fluorescence values obtained for GAS serotype M12 2728 in the presence of pre-immune antiserum, anti-19224134 antiserum, and the difference in fluorescence value between the pre-immune and anti-19224134 antiserum.

TABLE 33
Summary of FACS values for surface expression of
19224134 in an M12 serotype
2728

| Pre-immune | Anti-19224134 | Change |
|---|---|---|
| 137.8 | 485.32 | 348 |

[0851] FIG. 85 also provides the results of FACS analysis for surface expression of a pilin antigen that has homology to 19224134 identified in a different GAS serotype, M6. FACS analysis conducted with the 19224134 antisera was able to detect surface expression of the homologous 19224134 antigen on each of GAS serotypes M6 2724, M6 3650, and M6 2894. Table 34, below, quantitatively summarizes the FACS fluorescence values obtained for each GAS serotype in the presence of pre-immune antiserum, anti-19224134 antiserum, and the difference in fluorescence value between the preimmune and anti-19224134 antiserum.

TABLE 34
Summary of FACS values for surface expression of 19224134 in M6 serotypes

| 2724 | | | 3650 | | | 2894 | | |
|---|---|---|---|---|---|---|---|---|
| Pre- | Anti- | | Pre- | Anti- | | Pre- | Anti- | |
| immune | 19224134 | Change | immune | 19224134 | Change | immune | 19224134 | Change |
| 123.58 | 264.59 | 141 | 140.82 | 262.64 | 122 | 135.4 | 307.25 | 172 |

[0852] FIG. 86 provides the results of FACS analysis for surface expression of 19224135 on GAS serotype M12 2728. A shift in fluorescence is observed when anti-19224135 antiserum is present, demonstrating cell surface expression. Table 35, below, quantitatively summarizes the FACS fluorescence values obtained for GAS serotype M12 2728 in the presence of pre-immune antiserum, anti-19224135 antiserum, and the difference in fluorescence value between the pre-immune and anti-19224135 antiserum.

TABLE 35
Summary of FACS values for surface expression of
19224135 in an M12 serotype
2728

| Pre-immune | Anti-19224135 | Change |
|---|---|---|
| 151.38 | 471.95 | 321 |

[0853] FIG. 87 provides the results of FACS analysis for surface expression of 19224137 on GAS serotype M12 2728. A shift in fluorescence is observed when anti-19224137 antiserum is present, demonstrating cell surface expression. Table 36, below, quantitatively summarizes the FACS fluorescence values obtained for GAS serotype M12 2728 in the presence of pre-immune antiserum, anti-19224137 antiserum, and the difference in fluorescence value between the pre-immune and anti-19224137 antiserum.

TABLE 36
Summary of FACS values for surface expression of
19224137 in an M12 serotype
2728

| Pre-immune | Anti-19224137 | Change |
|---|---|---|
| 140.44 | 433.25 | 293 |

[0854] FIG. 88 provides the results of FACS analysis for surface expression of 19224141 on GAS serotype M12 2728. A shift in fluorescence is observed when anti-19224141 antiserum is present, demonstrating cell surface expression. Table 37, below, quantitatively summarizes the FACS fluorescence values obtained for GAS serotype M12 2728 in the presence of pre-immune antiserum, anti-19224141 antiserum, and the difference in fluorescence value between the pre-immune and anti-19224141 antiserum.

TABLE 37
Summary of FACS values for surface expression of
19224141 in an M12 serotype
2728

| Pre-immune | Anti-19224141 | Change |
|---|---|---|
| 147.02 | 498 | 351 |

[0855] 19224139 (designated as orf2) may also be expressed on the surface of GAS serotype M12 bacteria. FIG. 175 shows the results of FACS analysis for surface expression of 19224139 on M12 strain 2728. A slight shift in fluorescence is observed, which demonstrates that some 19224139 may be expressed on the GAS cell surface.

[0856] Surface expression of 19224135 on M12 serotype GAS has also been confirmed by Western blot analysis. FIG. 99 shows that while pre-immune era (Pα-4135) does not detect GAS M12 expression of 19224135, anti-19224135 immune sera (Iα-4135) is able to detect 19224135 protein in both total GAS M12 extracts (M12 tot) and GAS M12 fractions enriched for cell surface proteins (M12 surf prot). The 19224135 proteins detected in the total GAS M12 extracts or the GAS M12 extracts enriched for surface proteins are also present as high molecular weight structures, indicating that 19224135 may be in an oligomeric (pilus) form. See also FIG. 108, which provides a further Western blot showing that anti-19224135 antiserum (Anti-19224135) immunoreacts with high molecular weight structures in GAS M12 strain 2728 protein extracts enriched for surface proteins.

[0857] Surface expression of 19224137 on M12 serotype GAS has also been confirmed by Western blot analysis. FIG. 100 shows that while pre-immune sera (Pα-4137) does not detect GAS M12 expression of 19224137, anti-19224137 immune sera (Iα-4137) is able to detect 19224137 protein in both total GAS M12 extracts (M12 tot) and GAS M12 fractions enriched for cell surface proteins (M12 surf prot). The 19224137 proteins detected in the total GAS M12 extracts or the GAS M12 extracts enriched for surface proteins are also present as high molecular weight structures, indicating that 19224137 may be in an oligomeric (pilus) form. See also FIG. 108, which provides a further Western blot showing that anti-19224137 antiserum (Anti-19224137) immunoreacts with high molecular weight structures in GAS M12 strain 2728 protein extracts enriched for surface proteins.

Streptococcus pneumoniae

[0858] Adhesin island sequences can be identified in Streptococcus pneumoniae genomes. Several of these genomes include the publicly available Streptococcus pneumoniae TIGR4 genome or Streptococcus pneumoniae strain 670 genome. Examples of these S. pneumoniae AI sequence are discussed below.

[0859] S. pneumoniae Adhesin Islands generally include a series of open reading frames within a S. pneumoniae genome that encode for a collection of surface proteins and sortases. A S. pneumoniae Adhesin Island may encode for amino acid sequences comprising at least one surface protein. Alternatively, an S. pneumoniae Adhesin Island may encode for at least two surface proteins and at least one sortase. Preferably, a S. pneumoniae Adhesin Island encodes for at least three surface proteins and at least two sortases. One or more of the surface proteins may include an LPXTG motif (such as LPXTG (SEQ ID NO: 122)) or other sortase substrate motif. One or more S. pneumoniae AI

[symbol]

pneumoniae bacteria.

[0860] S. pneumoniae Adhesin Islands of the invention preferably include a divergently transcribed transcriptional regulator. The transcriptional regulator may regulate the expression of the S. pneumoniae AI operon.

[0861] The S. pneumoniae AI surface proteins may bind or otherwise adhere to fibrinogen, fibronectin, or collagen.

[0862] A schematic of the organization of a S. pneumoniae AI locus is provided in FIG. 137. The locus comprises open reading frames encoding a transcriptional regulator (rlrA), cell wall surface proteins (rrgA, rrgB, rrgC), and sortases (srtB, srtC, srtD). FIG. 137 also indicates the S. pneumoniae strain TIGR4 gene name corresponding to each of these open reading frames.

[0863] Tables 9 and 38 identify the genomic location of each of these open reading frames in S. pneumoniae strains TIGR4 and 670, respectively.

TABLE 9
S. pneumoniae AI sequences from TIGR4

| | | | | Synonym (AI Sequence | |
|---|---|---|---|---|---|
| Genomic Location | Strand | Length | PID | Identifier) | Functional description |
| 436302 . . . 437831 | − | 509 | 15900377 | SP0461 | transcriptional regulator |
| 438326 . . . 441007 | + | 893 | 15900378 | SP0462 | cell wall surface anchor family protein |
| 441231 . . . 443228 | + | 665 | 15900379 | SP0463 | cell wall surface anchor family protein |
| 443275 . . . 444456 | + | 393 | 15900380 | SP0464 | cell wall surface anchor family protein |
| 444675 . . . 444806 | − | 43 | 15900381 | SP0465 | hypothetical protein |
| 444857 . . . 445696 | + | 279 | 15900382 | SP0466 | sortase |
| 445791 . . . 446576 | + | 261 | 15900383 | SP0467 | sortase |
| 446563 . . . 447414 | + | 283 | 15900384 | SP0468 | sortase |

TABLE 38
S. pneumoniae strain 670 AI sequences

| Genomic | | AI Sequence | |
|---|---|---|---|
| Location | Strand | Identifier\ | Functional description |
| 4383-5645 | − | Orf1_670 | IS1167, transposase |
| 5910-7439 | − | Orf2_670 | transcriptional regulator, putative |
| 7934-10606 | + | Orf3_670 | cell wall surface anchor family |
| | | | protein |
| 10839-12773 | + | Orf4_670 | cell wall surface anchor family |
| | | | protein |
| 12796-14001 | + | Orf5_670 | cell wall surface anchor family |
| | | | protein |
| 14327-15241 | + | Orf6_670 | sortase, putative |
| 15336-16121 | + | Orf7_670 | sortase, putative |
| 16108-16959 | + | Orf8_670 | sortase, putative |

[0864] The full-length nucleotide sequence of the S. pneumoniae strain 670 AI is also shown in FIG. 101, as is its translated amino acid sequence.

[0865] At least eight other S. pneumoniae strains contain an adhesin island locus described by the locus depicted in FIG. 137. These strains were identified by an amplification analysis. The genomes of different S. pneumoniae strains were amplified with eleven separate sets of primers. The sequence of each of these primers is provided below in Table 41.

TABLE 41
Sequences of primers used to amplify AI locus

| Pri- | | |
|---|---|---|
| mer | | Reverse |
| Pair | Forward Primer Sequence | Primer Sequence |
| 1 | ACTTTCTAATGAGTTGTTTAGGCG | AGCGACAAGCCACTGTAT |
| | | CATATT |
| 2 | CTGGTCGATAACTCCTTCAATCTT | GTACGACAAAAGTGTGGC |
| | | TTGTT |
| 3 | GAATGCGATATTCAGGACCAACTA | ATCTCACTGAGTTAATCC |
| | | GTTCAC |
| 4 | TGTATACAAGTGTGTCATTGCCAG | CATCTTCACCTGTTCTCA |
| | | CATTTT |
| 5 | GCGGTCTTTAGTCTTCAAAAACA | CAAGAGAAAAACACAGAG |
| | | CCATAA |
| 6 | TTGCTTAAGTAAGAGAGAAAGGAGC | CAGGAGTATAGTGTCCGC |
| | | TTTCTT |
| 7 | GGCAATGTTGACTTTATGAAGGTG | TATCAGCATCCCTTTATC |
| | | TTCAAAC |
| 8 | TGAGATTTTCTCGTTTCTCTTAGC | AATAGACGATGGGTATTG |
| | | ATCATGT |
| 9 | CCGACGAACTTTGATGATTTATTG | ACCAACAGACGATGACTG |
| | | TTAATC |
| 10 | AATGACTTTGAGCCTGTCTTGAT | TTCTACAATTTCCTGGCC |
| | | ATTATC |
| 11 | GCCATTTGGATCAGCTAAAAGTT | TTTTTCAACCCACTACAG |
| | | TTGACA |

These primers hybridized along the entire length of the AI locus to generate amplification products representative of sequences throughout the locus. See FIG. 138, which is a schematic of the location where each of these primers hybridizes to the S. pneumoniae AI locus. FIG. 139A provides the set of amplicons obtained from amplification of the AI locus in S. pneumoniae strain TIGR4. FIG. 139B provides the length, in base pairs, of each amplicon in S. pneumoniae strain TIGR4. Amplification of the genome of S. pneumoniae strains 19A Hungary 6, 6B Finland 12, 6B Spain 2, 9V Spain 3, 14 CSR 10, 19F Taiwan 14, 23F Taiwan 15, and 23F Poland 16 produced a set of eleven amplicons for the eleven primer pairs, indicating that each of these strains also contained the S. pneumoniae AI locus.

[0866] The S. pneumoniae strains were also identified as containing the AI locus by comparative genome hybridization (CGH) analysis. The genomes of sixteen S. pneumoniae strains were interrogated for the presence of the AI locus by comparison to unique open reading frames of strain TIGR4. The AI locus was detected by this method in strains 19A Hungary 6 (19AHUN), 6B Finland 12 (6BFIN12), 6B Spain 2 (6BSP2), 14CSR10 (14 CSR10), 9V Spain 3 (9VSP3), 19F Taiwan 14 (19FTW14), 23F Taiwan 15 (19FTW15), and 23F Poland 16 (23FP16). See FIG. 140.

[0867] The AI locus has been sequenced for each of these strains and the nucleotide and encoded amino acid sequence for each orf has been determined. An alignment of the complete nucleotide sequence of the adhesin island present in each of the ten strains is provided in FIG. 196. Aligning the amino acid sequences encoded by the orfs reveals conservation of many of the AI polypeptide amino acid sequences. For example, Table 39 provides a comparison of the percent identities of the polypeptides encoded within the S. pneumoniae strain 670 and TIGR4 adhesin islands.

TABLE 39
Pecent identity comparison of S. pneumoniae strains AI sequences

| S. pneumoniae | S. pneumoniae | |
|---|---|---|
| strain 670 | from TIGR4 | |
| polypeptide | polypeptide | Shared identity of polypeptides |
| Orf1_670 | SP0460 | 99.3% identity in 422 aa overlap |
| Orf2_670 | SP0461 | 100.0% identity in 509 aa overlap |
| Orf3_670 | SP0462 | 83.2% identity in 895 aa overlap |
| Orf4_670 | SP0463 | 47.9% identity in 678 aa overlap |
| Orf5_670 | SP0464 | 99.7% identity in 393 aa overlap |
| Orf6_670 | SP0466 | 100.0% identity in 279 aa overlap |
| Orf7_670 | SP0467 | 94.2% identity in 260 aa overlap |
| Orf8_670 | SP0468 | 91.5% identity in 283 aa overlap |

FIGS. 141-147 each provide a multiple sequence alignment for the polypeptides encoded by one of the open reading frames in all ten AI-positive S. pneumoniae strains. In each of the sequence alignments, light shading indicates an LPXTG motif and dark shading indicates the presence of an E-box motif with the conserved glutamic acid residue of the E-box motif in bold.

[0868] The sequence alignments also revealed that the polypeptides encoded by most of the open reading frames may be divided into two groups of homology, S. pneumoniae AI-a and AI-b. S. pneumoniae strains that comprise AI-a include 14 CSR 10, 19A Hungary 6, 23F Poland 15, 670, 6B Finland 12, and 6B Spain 2. S. pneumoniae strains that comprise AI-b include 19F Taiwan 14, 9V Spain 3, 23F Taiwan 15, and TIGR4. An immunogenic composition of the invention may comprise one or more polypeptides from within each of S. pneumoniae AI-a and AI-b. For example, polypeptide RrgB, encoded by open reading frame 4, may be divided within two such groups of homology. One group contains the RrgB sequences of six S. pneumoniae strains and a second group contains the RrgB sequences of four S. pneumoniae strains. While the amino acid sequence of the strains within each individual group is 99-100 percent identical, the amino acid sequence identity of the strains in the first relative to the second group is only 48%. Table 41 provides the identity comparisons of the amino acid sequences encoded by each open reading frame for the ten S. pneumoniae strains.

TABLE 42
Conservation of amino acid sequences encoded by the
S. pneumoniae AI locus

| | | | | % Identity |
|---|---|---|---|---|
| | Encoded | Groups of | % Identity in | Between |
| Putative Role of Polypeptide | by Orf | Homology | Group | Groups |
| RlrA, transcriptional regulator | 2 | 1 group (10 strains) | 100 | — |
| RrgA, cell wall surface protein | 3 | 2 groups (6 + 4) | 98-100 | 83 |
| RrgB, cell wall surface protein | 4 | 2 groups (6 + 4) | 99-100 | 48 |
| RrgC, cell wall surface protein | 5 | 2 groups (6 + 4) | 99-100 | 97 |
| SrtB, putative sortase | 6 | 2 groups (7 + 3) | 99-100 | 97 |
| SrtC, putative sortase | 7 | 2 groups (6 + 4) | 95-100 | 93 |
| SrtD, putative sortase | 8 | 2 groups (6 + 4) | 99-100 | 92 |

[0869] The division of homology between the RrgB polypeptide in the S. pneumoniae strains is due a lack of amino acid sequence identity in the central amino acid residues. Amino acid residues 1-30 and 617-665 are identical for each of the ten S. pneumoniae strains. However, amino acid residues 31-616 share between 42 and 100 percent identity between strains. See FIG. 149. The shared N- and C-terminal regions of identity in the RrgB polypeptides may be preferred portions of the RrgB polypeptide for use in an immunogenic composition. Similarly, shared regions of identity in any of the polypeptides encoded by the S. pneumoniae AI locus may be preferable for use in immunogenic compositions. One of skill in the art, using the amino acid alignments provided in FIGS. 141-147, would readily be able to determine these regions of identity.

[0870] The S. pneumoniae comprising these AI loci do, in fact, express high molecular weight polymers on their surface, indicating the presence of pili. See FIG. 182, which shows detection of high molecular weight structures expressed by S. pneumoniae strains that comprise the adhesin island

[symbol]

microscopy and negative staining detects the presence of pili extending from the surface of S. pneumoniae. See FIG. 185. To demonstrate that the adhesin island locus was responsible for the pili, the rrgA-srtD region of TIGR 4 were deleted. Deletion of this region of the adhesin island resulted in a loss of pili expression. See FIG. 186. See also FIG. 235, which provides an electron micrograph of S. pneumoniae lacking the rrgA-srtD region immunogold stained using anti-RrgB and anti-RrgC antibodies. No pili can be seen. Similarly to that described above, a S. pneumoniae bacteria that lacks a transcriptional repressor, mgrA, of genes in the adhesin island expresses pili. See FIG. 187. However, and as expected, a S. pneumoniae bacteria that lacks both the mgrA and adhesin island genes in the rrgA-srtD region does not express pili. See FIG. 188.

[0871] These high molecular weight pili structures appear to play a role in adherence of S. pneumoniae to cells. S. pneumoniae TIGR4 that lack the pilus operon have significantly diminished ability to adhere to A549 alveolar cells in vitro. See FIG. 184.

[0872] The Sp0463 (S. pneumoniae TIGR4 rrgB) adhesion island polypeptide is expressed in oligomeric form. Whole cell extracts were analyzed by Western blot using a Sp0463 antiserum. The antiserum cross-hybridized with high molecular weight Sp0463 polymers. See FIG. 156. The antiserum did not cross-hybridize with polypeptides from D39 or R6 strains of S. pneumoniae, which do not contain the AI locus depicted in FIG. 137. Immunogold labelling of S. pneumoniae TIGR4 using RrgB antiserum confirms the presence of RrgB in pili. FIG. 189 shows double-labeling of S. pneumoniae TIGR 4 bacteria with immunolabeling for RrgB (5 nm gold particles) and RrgC (10 nm gold particles) protein. The RrgB protein is detected as present at intervals along the pilus structure. The RrgC protein is detected at the tips of the pili. See FIG. 234 at arrows; FIG. 234 is a close up of a pilus in FIG. 189 at the location indicated by *.

[0873] The RrgA protein appears to be present in and necessary for formation of high molecular weight structures on the surface of S. pneumoniae TIGR4. See FIG. 181 which provides the results of Western blot analysis of TIGR4 S. pneumoniae lacking the gene encoding RrgA. No high molecular weight structures are detected in S. pneumoniae that do not express RrgA using antiserum raised against RrgB. See also FIG. 183.

[0874] A detailed diagram of the amino acid sequence comparisons of the RrgA protein in the ten S. pneumoniae strains is shown in FIG. 148. The diagram reveals the division of the individual S. pneumoniae strains into the two different homology groups.

[0875] The cell surface polypeptides encoded by the S. pneumoniae TIGR4 AI, Sp0462 (rrgA), Sp0463 (rrgB), and Sp0464 (rrgC), have been cloned and expressed. See examples 15-17. A polyacrylamide gel showing successful recombinant expression of RrgA is provided in FIG. 190A. Detection of the RrgA protein, which is expressed in pET21b with a histidine tag, is also shown by Western blot analysis in FIG. 190B, using an anti-histidine tag antibody.

[0876] Antibodies that detect RrgB and RrgC antibodies have been produced in mice. See FIGS. 191 and 192, which show detection of RrgB and RrgC, respectively, using the raised antibodies.

[symbol]

SrtB type sortases have been identified in several S. pneumoniae clinical isolates, demonstrating conservation of a SrtB type sortase across these isolates.

### Recombinantly Produced AI Polypeptides

[0877] It is also an aspect of the invention to alter a non-AI polypeptide to be expressed as an AI polypeptide. The non-AI polypeptide may be genetically manipulated to additionally contain AI polypeptide sequences, e.g., a sortase substrate, pilin, or E-box motif, which may cause expression of the non-AI polypeptide as an AI polypeptide. Alternatively the non-AI polypeptide may be genetically manipulated to replace an amino acid sequence within the non-AI polypeptide for AI polypeptide sequences, e.g., a sortase substrate, pilin, or E-box motif, which may cause expression of the non-AI polypeptide as an AI polypeptide. Any number of amino acid residues may be added to the non-AI polypeptide or may be replaced within the non-AI polypeptide to cause its expression as an AI polypeptide. At least 5, 6, 7, 8, 9, 10, 15, 20, 25, 30, 35, 50, 75, 100, 150, 200, or 250 amino acid residues may be replaced or added to the non-AI polypeptide amino acid sequence. GBS 322 may be one such non-AI polypeptide that may be expressed as an AI polypeptide.

### GBS Adhesin Island Sequences

[0878] The GBS AI polypeptides of the invention can, of course, be prepared by various means (e.g. recombinant expression, purification from GBS, chemical synthesis etc.) and in various forms (e.g. native, fusions, glycosylated, non-glycosylated etc.). They are preferably prepared in substantially pure form (i.e. substantially free from other streptococcal or host cell proteins) or substantially isolated form.

[0879] The GBS AI proteins of the invention may include polypeptide sequences having sequence identity to the identified GBS proteins. The degree of sequence identity may vary depending on the amino acid sequence (a) in question, but is preferably greater than 50% (e.g. 60%, 65%, 70%, 75%, 80%, 85%, 90%, 91%, 92%, 93%, 94%, 95%, 96%, 97%, 98%, 99%, 99.5% or more). Polypeptides having sequence identity include homologs, orthologs, allelic variants and functional mutants of the identified GBS proteins. Typically, 50% identity or more between two proteins is considered to be an indication of functional equivalence. Identity between proteins is preferably determined by the Smith-Waterman homology search algorithm as implemented in the MPSRCH program (Oxford Molecular), using an affinity gap search with parameters gap open penalty=12 and gap extension penalty=1.

[0880] The GBS adhesin island polynucleotide sequences may include polynucleotide sequences having sequence identity to the identified GBS adhesin island polynucleotide sequences. The degree of sequence identity may vary depending on the polynucleotide sequence in question, but is preferably greater than 50% (e.g. 60%, 65%, 70%, 75%, 80%, 85%, 90%, 91%, 92%, 93%, 94%, 95%, 96%, 9.7%, 98%, 99%, 99.5% or more).

[0881] The GBS adhesin island polynucleotide sequences of the invention may include polynucleotide fragments of the identified adhesin island sequences. The length of the fragment may

[symbol]

fragment is preferably at least 10 consecutive polynucleotides, (e.g. at least 10, 12, 14, 16, 18, 20, 25, 30, 35, 40, 50, 60, 70, 80, 90, 100, 150, 200 or more).

[0882] The GBS adhesin island amino acid sequences of the invention may include polypeptide fragments of the identified GBS proteins. The length of the fragment may vary depending on the amino acid sequence of the specific GBS antigen, but the fragment is preferably at least 7 consecutive amino acids, (e.g. 8, 10, 12, 14, 16, 18, 20, 25, 30, 35, 40, 50, 60, 70, 80, 90, 100, 150, 200 or more). Preferably the fragment comprises one or more epitopes from the sequence. Other preferred fragments include (1) the N-terminal signal peptides of each identified GBS protein, (2) the identified GBS protein without their N-terminal signal peptides, and (3) each identified GBS protein wherein up to 10 amino acid residues (e.g. 1, 2, 3, 4, 5, 6, 7, 8, 9, 10, 15, 20, 25 or more) are deleted from the N-terminus and/or the C-terminus e.g. the N-terminal amino acid residue may be deleted. Other fragments omit one or more domains of the protein (e.g. omission of a signal peptide, of a cytoplasmic domain, of a transmembrane domain, or of an extracellular domain).

### GBS80

[0883] Examples of preferred GBS 80 fragments are discussed below. Polynucleotide and polypeptide sequences of GBS 80 from a variety of GBS serotypes and strain isolates are set forth in FIGS. 18 and 22. The polynucleotide and polypeptide sequences for GBS 80 from GBS serotype V, strain isolate 2603 are also included below as SEQ ID NOS 1 and 2:

SEQ ID NO. 1
ATGAAATTATCGAAGAAGTTATTGTTTTCGGCTGCTGTTTTAACAATGGTGGCGGGGTCAACTGTTGAACCAGTA
GCTCAGTTTGCGACTGGAATGAGTATTGTAAGAGCTGCAGAAGTGTCACAAGAACGCCCAGCGAAAACAACAGTA
AATATCTATAAATTACAAGCTGATAGTTATAAATCGGAAATTACTTCTAATGGTGGTATCGAGAATAAAGACGGC
GAAGTAATATCTAACTATGCTAAACTTGGTGACAATGTAAAAGGTTTGCAAGGTGTACAGTTTAAACGTTATAAA
GTCAAGACGGATATTTCTGTTGATGAATTGAAAAAATTGACAACAGTTGAAGCAGCAGATGCAAAAGTTGGAACG
ATTCTTGAAGAAGGTGTCAGTCTACCTCAAAAAACTAATGCTCAAGGTTTGGTCGTCGATGCTCTGGATTCAAAA
AGTAATGTGAGATACTTGTATGTAGAAGATTTAAAGAATTCACCTTCAAACATTACCAAAGCTTATGCTGTACCG
TTTGTGTTGGAATTACCAGTTGCTAACTCTACAGGTACAGGTTTCCTTTCTGAAATTAATATTTACCCTAAAAAC
GTTGTAACTGATGAACCAAAAACAGATAAAGATGTTAAAAAATTAGGTCAGGACGATGCAGGTTATACGATTGGT
GAAGAATTCAAATGGTTCTTGAAATCTACAATCCCTGCCAATTTAGGTGACTATGAAAAATTTGAAATTACTGAT
AAATTTGCAGATGGCTTGACTTATAAATCTGTTGGAAAAATCAAGATTGGTTCGAAAACACTGAATAGAGATGAG
CACTACACTATTGATGAACCAACAGTTGATAACCAAAATACATTAAAAATTACGTTTAAACCAGAGAAATTTAAA
GAAATTGCTGAGCTACTTAAAGGAATGACCCTTGTTAAAAATCAAGATGCTCTTGATAAAGCTACTGCAAATACA
GATGATGCGGCATTTTTGGAAATTCCAGTTGCATCAACTATTAATGAAAAAGCAGTTTTAGGAAAAGCAATTGAA
AATACTTTTGAACTTCAATATGACCATACTCCTGATAAAGCTGACAATCCAAAACCATCTAATCCTCCAAGAAAA
CCAGAAGTTCATACTGGTGGGAAACGATTTGTAAAGAAAGACTCAACAGAAACACAAACACTAGGTGGTGCTGAG
TTTGATTTGTTGGCTTCTGATGGGACAGCAGTAAAATGGACAGATGCTCTTATTAAAGCGAATACTAATAAAAAC
TATATTGCTGGAGAAGCTGTTACTGGGCAACCAATCAAATTGAAATCACATACAGACGGTACGTTTGAGATTAAA
GGTTTGGCTTATGCAGTTGATGCGAATGCAGAGGGTACAGCAGTAACTTACAAATTAAAAGAAACAAAAGCACCA
GAAGGTTATGTAATCCCTGATAAAGAAATCGAGTTTACAGTATCACAAACATCTTATAATACAAAACCAACTGAC
ATCACGGTTGATAGTGCTGATGCAACACCTGATACAATTAAAAACAACAAACGTCCTTCAATCCCTAATACTGGT
GGTATTGGTACGGCTATCTTTGTCGCTATCGGTGCTGCGGTGATGGCTTTTGCTGTTAAGGGGATGAAGCGTCGT
ACAAAAGATAAC
SEQ ID NO: 2
MKLSKKLLFSAAVLTMVAGSTVEPVAQFATGMSIVRAAEVSQERPAKTTVNIYKLQADSYKSEITSNGGIENKDG
EVISNYAKLGDNVKGLQGVQFKRYKVKTDISVDELKKLTTVEAADAKVGTILEEGVSLPQKTNAQGLVVDALDSK
SNVRYLYVEDLKNSPSNITKAYAVPFVLELPVANSTGTGFLSEINIYPKNVVTDEPKTDKDVKKLGQDDAGYTIG
EEFKWFLKSTIPANLGDYEKFEITDKFADGLTYKSVGKIKIGSKTLNRDEHYTIDEPTVDNQNTLKITFKPEKFK
EIAELLKGMTLVKNQDATDKATANTDDAAFLEIPVASTINEKAVLGKAIENTFELQYDHTPDKADNPKPSNPPRK
PEVHTGGKRFVKKDSTETQTLGGAEFDLLASDGTAVKWTDALIKANTNKNYIAGEAVTGQPIKLKSHTDGTFEIK
GLAYAVDANAEGTAVTYKLKETKAPEGYVIPDKEIEFTVSQTSYNTKPTDITVDSADATPDTIKNNKRPSIPNTG
GIGTAIFVAIGAAVMAFAVKGMKRRTKDN

[0884] As described above, the compositions of the invention may include fragments of AI proteins. In some instances, removal of one or more domains, such as a leader or signal sequence region, a transmembrane region, a cytoplasmic region or a cell wall anchoring motif, may facilitate cloning of the gene encoding the protein and/or recombinant expression of the GBS AI protein. In addition, fragments comprising immunogenic epitopes of the cited GBS AI proteins may be used in the compositions of the invention.

[0885] For example, GBS 80 contains an N-terminal leader or signal sequence region which is indicated by the underlined sequence at the beginning of SEQ ID NO: 2 above. In one embodiment, one or more amino acids from the leader or signal sequence region of GBS 80 are removed. An example of such a GBS 80 fragment is set forth below as SEQ ID NO: 3:

SEQ ID NO: 3
AEVSQERPAKTTVNIYKLQADSYKSEITSNGGIENKDGEVISNYAKLGDNVKGLQGVQFKRYKVKTDISVDELKK
LTTVEAADAKVGTILEEGVSLPQKTNAQGLVVDALDSKSNVRYLYVEDLKNSPSNITKAYAVPFVLELPVANSTG
TGFLSEINIYPKNVVTDEPKTDKDVKKLGQDDAGYTIGEEFKWFLKSTIPANLGDYEKFEITDKFADGLTYKSVG
KIKIGSKTLNRDEHYTIDEPTVDNQNTLKITFKPEKFKEIAELLKGMTLVKNQDALDKATANTDDAAFLEIPVAS
TINEKAVLGKAIENTFELQYDHTPDKADNPKPSNPPRKPEVHTGGKRFVKKDSTETQTLGGAEFDLLASDGTAVK
WTDALIKANTNKNYIAGEAVTGQPIKLKSHTDGTFEIKGLAYAVDANAEGTAVTYKLKETKAPEGYVIPDKEIEF
TVSQTSYNTKPTDITVDSADATPDTIKNNKRPSIPNTGGIGTAIFVAIGAAVMAFAVKGMKRRTKDN

[0886] GBS 80 contains a C-terminal transmembrane region which is indicated by the underlined sequence near the end of SEQ ID NO: 2 above. In one embodiment, one or more amino acids from the transmembrane region and/or a cytoplasmic region are removed. An example of such a GBS 80 fragment is set forth below as SEQ ID NO: 4:

SEQ ID NO: 4
MKLSKKLLFSAAVLTMVAGSTVEPVAQFATGMSIVRAAEVSQERPAKTTVNIYKLQADSYKSEITSNGGIENKDG
EVISNYAKLGDNVKGLQGVQFKRYKVKTDISVDELKKLTTVEAADAKVGTILEEGVSLPQKTNAQGLVVDALDSK
SNVRYLYVEDLKNSPSNITKAYAVPFVLELPVANSTGTGFLSEINIYPKNVVTDEPKTDKDVKKLGQDDAGYTIG
EEFKWFLKSTIPANLGDYEKFEITDKFADGLTYKSVGKIKIGSKTLNRDEHYTIDEPTVDNQNTLKITFKPEKFK
EIAELLKGMTLVKNQDALDKATANTDDAAFLEIPVASTINEKAVLGKAIENTFELQYDHTPDKADNPKPSNPPRK
PEVHTGGKRFVKKDSTETQTLGGAEFDLLASDGTAVKWTDALIKANTNKNYIAGEAVTGQPIKLKSHTDGTFEIK
GLAYAVDANAEGTAVTYKLKETKAPEGYVIPDKEIEFTVSQTSYNTKPTDITVDSADATPDTIKNNKRPSIPNTG

[0887] GBS 80 contains an amino acid motif indicative of a cell wall anchor: SEQ ED NO: 5 IPNTG (shown in italics in SEQ ID NO: 2 above). In some recombinant host cell systems, it may be preferable to remove this motif to facilitate secretion of a recombinant GBS 80 protein from the host cell. Accordingly, in one preferred fragment of GBS 80 for use in the invention, the transmembrane and/or cytoplasmic regions and the cell wall anchor motif are removed from GBS 80. An example of such a GBS 80 fragment is set forth below as SEQ ID NO: 6.

SEQ ID NO: 6
MKLSKKLLFSAAVLTMVAGSTVEPVAQFATGMSIVRAAEVSQERPAKTTVNIYKLQADSYKSEITSNGGIENKDG
EVISNYAKLGDNVKGLQGVQFKRYKVKTDISVDELKKLTTVEAADAKVGTILEEGVSLPQKTNAQGLVVDALDSK
SNVRYLYVEDLKNSPSNITKAYAVPFVLELPVANSTGTGFLSEINIYPKNVVTDEPKTDKDVKKLGQDDAGYTIG
EEFKWFLKSTIPANLGDYEKFEITDKFADGLTYKSVGKIKIGSKTLNRDEHYTIDEPTVDNQNTLKITFKPEKFK
EIAELLKGMTLVKNQDALDKATANTDDAAFLEIPVASTINEKAVLGKAIENTFELQYDHTPDKADNPKPSNPPRK
PEVHTGGKRFVKKDSTETQTLGGAEFDLLASDGTAVKWTDALIKANTNKNYIAGEAVTGQPIKLKSHTDGTFEIK
GLAYAVDANAEGTAVTYKLKETKAPEGYVIPDKEIEFTVSQTSYNTKPTDITVDSADATPDTIKNNKRPS

[0888] Alternatively, in some recombinant host cell systems, it may be preferable to use the cell wall anchor motif to anchor the recombinantly expressed protein to the cell wall. The extracellular domain of the expressed protein may be cleaved during purification or the recombinant protein may be left attached to either inactivated host cells or cell membranes in the final composition.

[0889] In one embodiment, the leader or signal sequence region, the transmembrane and cytoplasmic regions and the cell wall anchor motif are removed from the GBS 80 sequence. An example of such a GBS 80 fragment is set forth below as SEQ ID NO: 7.

SEQ ID NO: 7
AEVSQERPAKTTVNIYKLQADSYKSEITSNGGIENKDGEVISNYAKLGDNVKGLQGVQFKRYKVKTDISVDELKK
LTTVEAADAKVGTILEEGVSLPQKTNAQGLVVDALDSKSNVRYLYVEDLKNSPSNITKAYAVPFVLELPVANSTG
TGFLSEINIYPKNVVTDEPKTDKDVKKLGQDDAGYTIGEEFKWFLKSTIPANLGDYEKFEITDKFADGLTYKSVG
KIKIGSKTLNRDEHYTIDEPTVDNQNTLKITFKPEKFKEIAELLKGMTLVKNQDALDKATANTDDAAFLEIPVAS
TINEKAVLGKAIENTFELQYDHTPDKADNPKPSNPPRKPEVHTGGKRFVKKDSTETQTLGGAEFDLLASDGTAVK
WTDALIKANTNKNYIAGEAVTGQPIKLKSHTDGTFEIKGLAYAVDANAEGTAVTYKLKETKAPEGYVIPDKEIEF
TVSQTSYNTKPTDITVDSADATPDTIKNNKRPS

[0890] Applicants have identified a particularly immunogenic fragment of the GBS 80 protein. This immunogenic fragment is located towards the N-terminus of the protein and is underlined in the GBS 80 SEQ ID NO: 2 sequence below. The underlined fragment is set forth below as SEQ ID NO: 8.

SEQ ID NO: 2
MKLSKKLLFSAAVLTMVAGSTVEPVAQFATGMSIVRAAEVSQERPAKTTVNIYKLQADSYKSEITSNGGIENKDG
EVISNYAKLGDNVKGLQGVQFKRYKVKTDISVDELKKLTTVEAADAKVGTILEEGVSLPQKTNAQGLVVDALDSK
SNVRYLYVEDLKNSPSNITKAYAVPFVLELPVANSTGTGFLSEINIYPKNVVTDEPKTDKDVKKLGQDDAGYTIG
EEFKWFLKSTIPANLGDYEKFEITDKFADGLTYKSVGKIKIGSKTLNRDEHYTIDEPTVDNQNTLKITFKPEKFK
EIAELLKGMTLVKNQDALDKATANTDDAAFLEIPVASTINEKAVLGKAIENTFELQYDHTPDKADNPKPSNPPRK
PEVHTGGKRFVKKDSTETQTLGGAEFDLLASDGTAVKWTDALIKANTNKNYIAGEAVTGQPIKLKSHTDGTFEIK
GLAYAVDANAEGTAVTYKLKETKAPEGYVIPDKEIEFTVSQTSYNTKPTDITVDSADATPDTIKNNKRPSIPNTG
GIGTAIFVAIGAAVMAFAVKGMKRRTKDN
SEQ ID NO: 8
AEVSQERPAKTTVNIYKLQADSYKSEITSNGGIENKDGEVISNYAKLGDNVKGLQGVQFKRYKVKTDISVDELKK
LTTVEAADAKVGTILEEGVSLPQKTNAQGLVVDALDSKSNVRYLYVEDLKNSPSNITKAYAVPFVLELPVANSTG
TGFLSEINIYPKNVVTDEPKTDKDVKKLGQDDAGYTIGEEFKWFLKSTIPANLGDYEKFEITDKFADGLTYKSVG
KIKIGSKTLNRDEHYTIDEPTVDNQNTLKITFKPEKFKEIAELLKG

[0891] The immunogenicity of the protein encoded by SEQ ID NO: 7 was compared against PBS, GBS whole cell, GBS 80 (full length) and another fragment of GBS 80, located closer to the C-terminus of the peptide (SEQ ID NO: 9, below).

SEQ ID NO: 9
MTLVKNQDALDKATANTDDAAFLEIPVASTINEKAVLGKAIENTFELQYDHTPDKADNPKPSNPPRKPEVHTGGK
RFVKKDSTETQTLGGAEFDLLASDGTAVKWTDALIKANTNKNYIAGEAVTGQPIKLKSHTDGTFEIKGLAYAVDA
NAEGTAVTYKLKETKAPEGYVIPDKEIEFTVSQTSYNTKPTDITVDSADATPDTIKNNKRPS

[0892] Both an Active Maternal Immunization Assay and a Passive Maternal Immunization Assay were conducted on this collection of proteins.

[symbol]

where female mice are immunized with the test antigen composition. The female mice are then bred and their pups are challenged with a lethal dose of GBS. Serum titers of the female mice during the immunization schedule are measured as well as the survival time of the pups after challenge.

[0893] Specifically, the Active Maternal Immunization assays referred to herein used groups of four CD-1 female mice (Charles River Laboratories, Calco Italy). These mice were immunized intraperitoneally with the selected proteins in Freund's adjuvant at days 1, 21 and 35, prior to breeding. 6-8 weeks old mice received 20 μg protein/dose when immunized with a single antigen, 30-45 μog protein/dose (15 μg each antigen) when immunized with combination of antigens. The immune response of the dams was monitored by using serum samples taken on day 0 and 49. The female mice were bred 2-7 days after the last immunization (at approximately t=36-37), and typically had a gestation period of 21 days. Within 48 hours of birth, the pups were challenged via I.P. with GBS in a dose approximately equal to a amount which would be sufficient to kill 70-90% of unimmunized pups (as determined by empirical data gathered from PBS control groups). The GBS challenge dose is preferably administered in 50 μl of THB medium. Preferably, the pup challenge takes place at 56 to 61 days after the first immunization. The challenge inocula were prepared starting from frozen cultures diluted to the appropriate concentration with THB prior to use. Survival of pups was monitored for 5 days after challenge.

[0894] As used herein, the Passive Maternal Immunization Assay refers to an in vivo protection assay where pregnant mice are passively immunized by injecting rabbit immune sera (or control sera) approximately 2 days before delivery. The pups are then challenged with a lethal dose of GBS.

[0895] Specifically, the Passive Maternal Immunization Assay referred to herein used groups of pregnant CD1 mice which were passively immunized by injecting 1 ml of rabbit immune sera or control sera via I.P., 2 days before delivery. Newborn mice (24-48 hrs after birth) are challenged via I.P. with a 70-90% lethal dose of GBS serotype III COH1. The challenge dose, obtained by diluting a frozen mid log phase culture, was administered in 50 μl of THB medium.

For both assays, the number of pups surviving GBS infection was assessed every 12 hrs for 4 days. Statistical significance was estimated by Fisher's exact test.

[0896] The results of each assay for immunization with SEQ ID NO: 7, SEQ ID NO: 8, PBS and GBS whole cell are set forth in Tables 1 and 2 below.

TABLE 1
Immunization

| | | % | |
|---|---|---|---|
| Antigen | Alive/total | Survival | Fisher's exact test |
| PBS (neg control) | 13/80 | 16% | |
| GBS (whole cell) | 54/65 | 83% | P < 0.00000001 |
| GBS80 (intact) | 62/70 | 88% | P < 0.00000001 |
| GBS80 (fragment) SEQ ID 7 | 35/64 | 55% | P = 0.0000013 |
| GBS80 (fragment) SEQ ID 8 | 13/67 | 19% | P = 0.66 |

TABLE 2
Passive Maternal Immunization

| | | % | |
|---|---|---|---|
| Antigen | Alive/total | Survival | Fisher's exact test |
| PBS (neg control) | 12/42 | 28% | |
| GBS (whole cell) | 48/52 | 92% | P < 0.00000001 |
| GBS80 (intact) | 48/55 | 87% | P < 0.00000001 |
| GBS80 (fragment) SEQ ID 7 | 45/57 | 79% | P = 0.0000006 |
| GBS80 (fragment) SEQ ID 8 | 13/54 | 24% | P = 1 |

[0897] As shown in Tables 1 and 2, immunization with the SEQ ID NO: 7 GBS 80 fragment provided a substantially improved survival rate for the challenged pups than the comparison SEQ ID NO: 8 GBS 80 fragment. These results indicate that the SEQ ID NO: 7 GBS 80 fragment may comprise an important immunogenic epitope of GBS 80.

[0898] As discussed above, pilin motifs, containing conserved lysine (K) residues have been identified in GBS 80. The pilin motif sequences are underlined in SEQ ID NO: 2, below. Conserved lysine (K) residues are marked in bold, at amino acid residues 199 and 207 and at amino acid residues 368 and 375. The pilin sequences, in particular the conserved lysine residues, are thought to be important for the formation of oligomeric, pilus-like structures of GBS 80. Preferred fragments of GBS 80 include at least one conserved lysine residue. Preferably, fragments include at least one pilin sequence.

SEQ ID NO: 2
MKLSKKLLFSAAVLTMVAGSTVEPVAQFATGMSIVRAAEVSQERPAKTTVNIYKLQADSYKSEITSNGGIENKDG
EVISNYAKLGDNVKGLQGVQFKRYKVKTDISVDELKKLTTVEAADAKVGTILEEGVSLPQKTNAQGLVVDALDSK
SNVRYLYVEDLKNSPSNITKAYAVPFVLELPVANSTGTGFLSEINIYPKNVVTDEPKTDKDVKKLGQDDAGYTIG
EEFKWFLKSTIPANLGDYEKFEITDKFADGLTYKSVGKIKIGSKTLNRDEHYTIDEPTVDNQNTLKITFKPEKFK
EIAELLKGMTLVKNQDALDKATANTDDAAFLEIPVASTINEKAVLGKAIENTFELQYDHTPDKADNPKPSNPPRK
PEVHTGGKRFVKKDSTETQTLGGAEFDLLASDGTAVKWTDALIKANTNKNYIAGEAVTGQPIKLKSHTDGTFEIK
GLAYAVDANAEGTAVTYKLKETKAPEGYVIPDKEIEFTVSQTSYNTKPTDITVDSADATPDTIKNNKRPSIPNTG
GIGTAIFVAIGAAVMAFAVKGMKRRTKDN

[0899] E boxes containing conserved glutamic residues have also been identified in GBS 80. The E box motifs are underlined in SEQ ID NO: 2 below. The conserved glutamic acid (E) residues, at amino acid residues 392 and 471, are marked in bold. The E box motifs, in particular the conserved glutamic acid residues, are thought to be important for the formation of oligomeric pilus-like structures of GBS 80. Preferred fragments of GBS 80 include at least one conserved glutamic acid residue. Preferably, fragments include at least one E box motif.

SEQ ID NO: 2
MKLSKKLLFSAAVLTMVAGSTVEPVAQFATGMSIVRAAEVSQERPAKTTVNIYKLQADSYKSEITSNGGIENKDG
EVISNYAKLGDNVKGLQGVQFKRYKVKTDISVDELKKLTTVEAADAKVGTILEEGVSLPQKTNAQGLVVDALDSK
SNVRYLYVEDLKNSPSNITKAYAVPFVLELPVANSTGTGFLSEINIYPKNVVTDEPKTDKDVKKLGQDDAGYTIG
EEFKWFLKSTIPANLGDYEKFEITDKFADGLTYKSVGKIKIGSKTLNRDEHYTIDEPTVDNQNTLKITFKPEKFK
EIAELLKGMTLVKNQDALDKATANTDDAAFLEIPVASTINEKAVLGKAIENTFELQYDHTPDKADNPKPSNPPRK
PEVHTGGKRFVKKDSTETQTLGGAEFDLLASDGTAVKWTDALIKANTNKNYIAGEAVTGQPIKLKSHTDGTFEIK
GLAYAVDANAEGTAVTYKLKETKAPEGYVIPDKEIEFTVSQTSYNTKPTDITVDSADATPDTIKNNKRPSIPNTG
GIGTAIFVAIGAAVMAFAVKGMKRRTKDN

### GBS 104

[0900] amino acid sequences of GBS 104 sequenced from serotype V isolated strain 2603 are set forth below as SEQ ID NOS 10 and 11:

SEQ ID NO.10
ATGAAAAAGAGACAAAAAATATGGAGAGGGTTATCAGTTACTTTACTAATCCTGTCCCAAATTCCATTTGGTATA
TTGGTACAAGGTGAAACCCAAGATACCAATCAAGCACTTGGAAAAGTAATTGTTAAAAAAACGGGAGACAATGCT
ACACCATTAGGCAAAGCGACTTTTGTGTTAAAAAATGACAATGATAAGTCAGAAACAAGTCACGAAACGGTAGAG
GGTTCTGGAGAAGCAACCTTTGAAAACATAAAACCTGGAGACTACACATTAAGAGAAGAAACAGCACCAATTGGT
TATAAAAAAACTGATAAAACCTGGAAAGTTAAAGTTGCAGATAACGGAGCAACAATAATCGAGGGTATGGATGCA
GATAAAGCAGAGAAACGAAAAGAAGTTTTGAATGCCCAATATCCAAAATCAGCTATTTATGAGGATACAAAAGAA
AATTACCCATTAGTTAATGTAGAGGGTTCCAAAGTTGGTGAACAATACAAAGCATTGAATCCAATAAATGGAAAA
GATGGTCGAAGAGAGATTGCTGAAGGTTGGTTATCAAAAAAAATTACAGGGGTCAATGATCTCGATAAGAATAAA
TATAAAATTGAATTAACTGTTGAGGGTAAAACCACTGTTGAAACGAAAGAACTTAATCAACCACTAGATGTCGTT
GTGCTATTAGATAATTCAAATAGTATGAATAATGAAAGAGCCAATAATTCTCAAAGAGCATTAAAAGCTGGGGAA
GCAGTTGAAAAGCTGATTGATAAAATTACATCAAATAAAGACAATAGAGTAGCTCTTGTGACATATGCCTCAACC
ATTTTTGATGGTACTGAAGCGACCGTATCAAAGGGAGTTGCCGATCAAAATGGTAAAGCGCTGAATGATAGTGTA
TCATGGGATTATCATAAAACTACTTTTACAGCAACTACACATAATTACAGTTATTTAAATTTAACAAATGATGCT
AACGAAGTTAATATTCTAAAGTCAAGAATTCCAAAGGAAGCGGAGCATATAAATGGGGATCGCACGCTCTATCAA
TTTGGTGCGACATTTACTCAAAAAGCTCTAATGAAAGCAAATGAAATTTTAGAGACACAAAGTTCTAATGCTAGA
AAAAAACTTATTTTTCACGTAACTGATGGTGTCCCTACGATGTCTTATGCCATAAATTTTAATCCTTATATATCA
ACATCTTACCAAAACCAGTTTAATTCTTTTTTAAATAAAATACCAGATAGAAGTGGTATTCTCCAAGAGGATTTT
ATAATCAATGGTGATGATTATCAAATAGTAAAAGGAGATGGAGAGAGTTTTAAACTGTTTTCGGATAGAAAAGTT
CCTGTTACTGGAGGAACGACACAAGCAGCTTATCGAGTACCGCAAAATCAACTCTCTGTAATGAGTAATGAGGGA
TATGCAATTAATAGTGGATATATTTATCTCTATTGGAGAGATTACAACTGGGTCTATCCATTTGATCCTAAGACA
AAGAAAGTTTCTGCAACGAAACAAATCAAAACTCATGGTGAGCCAACAACATTATACTTTAATGGAAATATAAGA
CCTAAAGGTTATGACATTTTTACTGTTGGGATTGGTGTAAACGGAGATCCTGGTGCAACTCCTCTTGAAGCTGAG
AAATTTATGCAATCAATATCAAGTAAAACAGAAAATTATACTAATGTTGATGATACAAATAAAATTTATGATGAG
CTAAATAAATACTTTAAAACAATTGTTGAGGAAAAACATTCTATTGTTGATGGAAATGTGACTGATCCTATGGGA
GAGATGATTGAATTCCAATTAAAAAATGGTCAAAGTTTTACACATGATGATTACGTTTTGGTTGGAAATGATGGC
AGTCAATTAAAAAATGGTGTGGCTCTTGGTGGACCAAACAGTGATGGGGGAATTTTAAAAGATGTTACAGTGACT
TATGATAAGACATCTCAAACCATCAAAATCAATCATTTGAACTTAGGAAGTGGACAAAAAGTAGTTCTTACCTAT
GATGTACGTTTAAAAGATAACTATATAAGTAACAAATTTTACAATACAAATAATCGTACAACGCTAAGTCCGAAG
AGTGAAAAAGAACCAAATACTATTCGTGATTTCCCAATTCCCAAAATTCGTGATGTTCGTGAGTTTCCGGTACTA
ACCATCAGTAATCAGAAGAAAATGGGTGAGGTTGAATTTATTAAAGTTAATAAAGACAAACATTCAGAATCGCTT
TTGGGAGCTAAGTTTCAACTTCAGATAGAAAAAGATTTTTCTGGGTATAAGCAATTTGTTCCAGAGGGAAGTGAT
GTTACAACAAAGAATGATGGTAAAATTTATTTTAAAGCACTTCAAGATGGTAACTATAAATTATATGAAATTTCA
AGTCCAGATGGCTATATAGAGGTTAAAACGAAACCTGTTGTGACATTTACAATTCAAAATGGAGAAGTTACGAAC
CTGAAAGCAGATCCAAATGCTAATAAAAATCAAATCGGGTATCTTGAAGGAAATGGTAAACATCTTATTACCAAC
ACTCCCAAACGCCCACCAGGTGTTTTTCCTAAAACAGGGGGAATTGGTACAATTGTCTATATATTAGTTGGTTCT
ACTTTTATGATACTTACCATTTGTTCTTTCCGTCGTAAACAATTG
SEQ ID NO. 11
MKKRQKIWRGLSVTLLILSQIPFGILVQGETQDTNQALGKVIVKKTGDNATPLGKATFVLKNDNDKSETSHETVE
GSGEATFENIKPGDYTLREETAPIGYKKTDKTWKVKVADNGATIIEGMDADKAEKRKEVLNAQYPKSAIYEDTKE
NYPLVNVEGSKVGEQYKALNPINGKDGRREIAEGWLSKKITGVNDLDKNKYKIELTVEGKTTVETKELNQPLDVV
VLLDNSNSMNNERANNSQRALKAGEAVEKLIDKITSNKDNRVALVTYASTIFDGTEATVSKGVADQNGKALNDSV
SWDYHKTTFTATTHNYSYLNLTNDANEVNILKSRIPKEAEHINGDRTLYQFGATFTQKALMKANEILETQSSNAR
KKLIFHVTDGVPTMSYAINFNPYISTSYQNQFNSFLNKIPDRSGILQEDFIINGDDYQIVKGDGESFKLFSDRKV
PVTGGTTQAAYRVPQNQLSVMSNEGYAINSGYIYLYWRDYNWVYPFDPKTKKVSATKQIKTHGEPTTLYFWGNIR
PKGYDIFTVGIGVNGDPGATPLEAEKFMQSISSKTENYTNVDDTNKIYDELNKYFKTIVEEKHSIVDGNVTDPMG
EMIEFQLKNGQSFTHDDYVLVGNDGSQLKNGVALGGPNSDGGILKDVTVTYDKTSQTIKINHLNLGSGQKVVLTY
DVRLKDNYISNKFYNTNNRTTLSPKSEKEPNTIRDFPIPKIRDVREFPVLTISNQKKMGEVEFIKVNKDKHSESL
LGAKFQLQIEKDFSGYKQFVPEGSDVTTKNDGKIYFKALQDGNYKLYEISSPDGYIEVKTKPVVTFTIQNGEVTN
LKADPNANKNQIGYLEGNGKHLITNTPKRPPGVFPKTGGIGTIVYILVGSTFMILTICSFRRKQL

[0901] GBS 104 contains an N-terminal leader or signal sequence region which is indicated by the underlined sequence at the beginning of SEQ ID NO 11 above. In one embodiment, one or more

[symbol]

example of such a GBS 104 fragment is set forth below as SEQ ID NO 12.

SEQ ID NO 12
GETQDTNQALGKVIVKKTGDNATPLGKATFVLKNDNDKSETSHETVEGSGEATFENIKPGDYTLREETAPIGYKK
TDKTWKVKVADNGATIIEGMDADKAEKRKEVLNAQYPKSAIYEDTKENYPLVNVEGSKVGEQYKALNPINGKDGR
REIAEGWLSKKITGVNDLDKNKYKIELTVEGKTTVETKELNQPLDVVVLLDNSNSMNNERANNSQRALKAGEAVE
KLIDKITSNKDNRVALVTYASTIFDGTEATVSKGVADQNGKALNDSVSWDYHKTTFTATTHNYSYLNLTNDANEV
NILKSRIPKEAEHINGDRTLYQFGATFTQKALMKANEILETQSSNARKKLIFHVTDGVPTMSYAINFNPYISTSY
QNQFNSFLNKIPDRSGILQEDFIINGDDYQIVKGDGESFKLFSDRKVPVTGGTTQAAYRVPQNQLSVMSNEGYAI
NSGYIYLYWRDYNWVYPFDPKTKKVSATKQIKTHGEPTTLYFNGNIRPKGYDIFTVGIGVNGDPGATPLEAEKFM
QSISSKTENYTNVDDTNKIYDELNKYFKTIVEEKHSIVDGNVTDPMGEMIEFQLKNGQSFTHDDYVLVGNDGSQL
KNGVALGGPNSDGGILKDVTVTYDKTSQTIKINHLNLGSGQKVVLTYDVRLKDNYISNKFYNTNNRTTLSPKSEK
EPNTIRDFPIPKIRDVREFPVLTISNQKKMGEVEFIKVNKDKHSESLLGAKFQLQIEKDFSGYKQFVPEGSDVTT
KNDGKIYFKALQDGNYKLYEISSPDGYIEVKTKPVVTFTIQNGEVTNLKADPNANKNQIGYLEGNGKHLITNTPK
RPPGVFPKTGGIGTIVYILVGSTFMILTICSFRRKQL

[0902] GBS 104 contains a C-terminal transmembrane and/or cytoplasmic region which is indicated by the underlined region near the end of SEQ ID NO 11 above. In one embodiment, one or more amino acids from the transmembrane or cytoplasmic regions are removed. An example of such a GBS 104 fragment is set forth below as SEQ ID NO 13.

SEQ ID NO: 13
MKKRQKIWRGLSVTLLILSQIPFGILVQGETQDTNQALGKVIVKKTGDNATPLGKATFVLKNDNDKSETSHETVE
GSGEATFENIKPGDYTLREETAPIGYKKTDKTWKVKVADNGATIIEGMDADKAEKRKEVLNAQYPKSAIYEDTKE
NYPLVNVEGSKVGEQYKALNPINGKDGRREIAEGWLSKKITGVNDLDKNKYKIELTVEGKTTVETKELNQPLDVV
VLLDNSNSMNNERANNSQRALKAGEAVEKLIDKITSNKDNRVALVTYASTIFDGTEATVSKGVADQNGKALNDSV
SWDYHKTTFTATTHNYSYLNLTNDANEVNILKSRIPKEAEHINGDRTLYQFGATFTQKALMKANEILETQSSNAR
KKLIFHVTDGVPTMSYAINFNPYISTSYQNQFNSFLNKIPDRSGILQEDFIINGDDYQIVKGDGESFKLFSDRKV
PVTGGTTQAAYRVPQNQLSVMSNEGYAINSGYIYLYWRDYNWVYPFDPKTKKVSATKQIKTHGEPTTLYFNGNIR
PKGYDIFTVGIGVNGDPGATPLEAEKFMQSISSKTENYTNVDDTNKIYDELNKYFKTIVEEKHSIVDGNVTDPMG
EMIEFQLKNGQSFTHDDYVLVGNDGSQLKNGVALGGPNSDGGILKDVTVTYDKTSQTIKINHLNLGSGQKVVLTY
DVRLKDNYISNKFYNTNNRTTLSPKSEKEPNTIRDFPIPKIRDVREFPVLTISNQKKMGEVEFIKVNKDKHSESL
LGAKFQLQIEKDFSGYKQFVPEGSDVTTKNDGKIYFKALQDGNYKLYEISSPDGYIEVKTKPVVTFTIQNGEVTN
LKADPNANKNQIGYLEGNGKHLITNT

[0903] In one embodiment, one or more amino acids from the leader or signal sequence region and one or more amino acids from the transmembrane or cytoplasmic regions are removed. An example of such a GBS 104 fragment is set forth below as SEQ ID NO 14.

SEQ ID NO: 14
GETQDTNQALGKVIVKKTGDNATPLGKATFVLKNDNDKSETSHETVEGSGEATFENIKPGDYTLREETAPIGYKK
TDKTWKVKVADNGATIIEGMDADKAEKRKEVLNAQYPKSAIYEDTKENYPLVNVEGSKVGEQYKALNPINGKDGR
REIAEGWLSKKITGVNDLDKNKYKIELTVEGKTTVETKELNQPLDVVVLLDNSNSMNNERANNSQRALKAGEAVE
KLIDKITSNKDNRVALVTYASTIFDGTEATVSKGVADQNGKALNDSVSWDYHKTTFTATTHNYSYLNLTNDANEV
NILKSRIPKEAEHINGDRTLYQFGATFTQKALMKANEILETQSSNARKKLIFHVTDGVPTMSYAINFNPYISTSY
QNQFNSFLNKIPDRSGILQEDFIINGDDYQIVKGDGESFKLFSDRKVPVTGGTTQAAYRVPQNQLSVMSNEGYAI
NSGYIYLYWRDYNWVYPFDPKTKKVSATKQIKTHGEPTTLYFNGNIRPKGYDIFTVGIGVNGDPGATPLEAEKFM
QSISSKTENYTNVDDTNKIYDELNKYFKTIVEEKHSIVDGNVTDPMGEMIEFQLKNGQSFTHDDYVLVGNDGSQL
KNGVALGGPNSDGGILKDVTVTYDKTSQTIKINHLNLGSGQKVVLTYDVRLKDNYISNKFYNTNNRTTLSPKSEK
EPNTIRDFPIPKIRDVREFPVLTISNQKKMGEVEFIKVNKDKHSESLLGAKFQLQIEKDFSGYKQFVPEGSDVTT
KNDGKIYFKALQDGNYKLYEISSPDGYIEVKTKPVVTFTIQNGEVTNLKADPNANKNQIGYLEGNGKHLITNT

[0904] GBS 104, like GBS 80, contains an amino acid motif indicative of a cell wall anchor: SEQ ID NO: 123 FPKTG (shown in italics in SEQ ID NO: 11 above). In some recombinant host cell systems, it may be preferable to remove this motif to facilitate secretion of a recombinant GBS 104 protein from the host cell. Accordingly, in one preferred fragment of GBS 104 for use in the

[symbol]

removed from GBS 104. Alternatively, in some recombinant host cell systems, it may be preferable to use the cell wall anchor motif to anchor the recombinantly expressed protein to the cell wall. The extracellular domain of the expressed protein may be cleaved during purification or the recombinant protein may be left attached to either inactivated host cells or cell membranes in the final composition.

[0905] Two pilin motifs, containing conserved lysine (K) residues, have been identified in GBS 104. The pilin motif sequences are underlined in SEQ ID NO: 11, below. Conserved lysine (K) residues are marked in bold, at amino acid residues 141 and 149 and at amino acid residues 499 and 507. The pilin sequence, in particular the conserved lysine residues, are thought to be important for the formation of oligomeric, pilus-like structures of GBS 104. Preferred fragments of GBS 104 include at least one conserved lysine residue. Preferably, fragments include at least one pilin sequence.

SEQ ID NO. 11
MKKRQKIWRGLSVTLLILSQIPFGILVQGETQDTNQALGKVIVKKTGDNATPLGKATFVLKNDNDKSETSHETVE
GSGEATFENIKPGDYTLREETAPIGYKKTDKTWKVKVADNGATIIEGMDADKAEKRKEVLNAQYPKSAIYEDTKE
NYPLVNVEGSKVGEQYKALNPINGKDGRREIAEGWLSKKITGVNDLDKNKYKIELTVEGKTTVETKELNQPLDVV
VLLDNSNSMNNERANNSQRALKAGEAVEKLIDKITSNKDNRVALVTYASTIFDGTEATVSKGVADQNGKALNDSV
SWDYHKTTFTATTHNYSYLNLTNDANEVNILKSRIPKEAEHINGDRTLYQFGATFTQKALMKANEILETQSSNAR
KKLIFHVTDGVPTMSYAINFNPYISTSYQNQFNSFLNKIPDRSGILQEDFIINGDDYQIVKGDGESFKLFSDRKV
PVTGGTTQAAYRVPQNQLSVMSNEGYAINSGYIYLYWRDYNWVYPFDPKTKKVSATKQIKTHGEPTTLYFNGNIR
PKGYDIFTVGIGVNGDPGATPLEAEKFMQSISSKTENYTNVDDTNKIYDELNKYFKTIVEEKHSIVDGNVTDPMG
EMIEFQLKNGQSFTHDDYVLVGNDGSQLKNGVALGGPNSDGGILKDVTVTYDKTSQTIKINHLNLGSGQKVVLTY
DVRLKDNYISNKFYNTNNRTTLSPKSEKEPNTIRDFPIPKIRDVREFPVLTISNQKKMGEVEFIKVNKDKHSESL
LGAKFQLQIEKDESGYKQFVPEGSDVTTKNDGKIYFKALQDGNYKLYEISSPDGYIEVKTKPVVTFTIQNGEVTN
LKADPNANKNQIGYLEGNGKHLITNTPKRPPGVFPKTGGIGTIVYILVGSTFMILTICSFRRKQL

[0906] Two E boxes containing a conserved glutamic residues have also been identified in GBS 104. The E box motifs are underlined in SEQ ID NO: 11 below. The conserved glutamic acid (E) residues, at amino acid residues 94 and 798, are marked in bold. The E box motifs, in particular the conserved glutamic acid residues, are thought to be important for the formation of oligomeric pilus-like structures of GBS 104. Preferred fragments of GBS 104 include at least one conserved glutamic acid residue. Preferably, fragments include at least one E box motif.

SEQ ID NO. 11
MKKRQKIWRGLSVTLLILSQIPFGILVQGETQDTNQALGKVIVKKTGDNATPLGKATFVLKNDNDKSETSHETVE
GSGEATFENIKPGDYTLREETAPIGYKKTDKTWKVKVADNGATIIEGMDADKAEKRKEVLNAQYPKSAIYEDTKE
NYPLVNVEGSKVGEQYKALNPINGKDGRREIAEGWLSKKITGVNDLDKNKYKIELTVEGKTTVETKELNQPLDVV
VLLDNSNSMNNERANNSQRALKAGEAVEKLIDKITSNKDNRVALVTYASTIFDGTEATVSKGVADQNGKALNDSV
SWDYHKTTFTATTHNYSYLNLTNDANEVNILKSRIPKEAEHINGDRTLYQFGATFTQKALMKANEILETQSSNAR
KKLIFHVTDGVPTMSYAINFNPYISTSYQNQFNSFLNKIPDRSGILQEDFIINGDDYQIVKGDGESFKLFSDRKV
PVTGGTTQAAYRVPQNQLSVMSNEGYAINSGYIYLYWRDYNWVYPFDPKTKKVSATKQIKTHGEPTTLYFNGNIR
PKGYDIFTVGIGVNGDPGATPLEAEKFMQSISSKTENYTNVDDTNKIYDELNKYFKTIVEEKHSIVDGNVTDPMG
EMIEFQLKNGQSFTHDDYVLVGNDGSQLKNGVALGGPNSDGGILKDVTVTYDKTSQTIKINHLNLGSGQKVVLTY
DVRLKDNYISNKFYNTNNRTTLSPKSEKEPNTIRDFPIPKIRDVREFPVLTISNQKKMGEVEFIKVNKDKHSESL
LGAKFQLQIEKDFSGYKQFVPEGSDVTTKNDGKIYFKALQDGNYKLYEISSPDGYIEVKTKPVVTFTIQNGEVTN
LKADPNANKNQIGYLEGNGKHLITNTPKRPPGVFPKTGGIGTIVYILVGSTFMILTICSFRRKQL

### GBS 067

[0907] The following offers examples of preferred GBS 067 fragments. Nucleotide and amino acid sequence of GBS 067 sequences from serotype V isolated strain 2603 are set forth below as SEQ ID NOS: 15 and 16.

SEQ ID NO: 15
ATGAGAAAATACCAAAAATTTTCTAAAATATTGACGTTAAGTCTTTTTTGTTTGTCGCAAATACCGCTTAATACC
AATGTTTTAGGGGAAAGTACCGTACCGGAAAATGGTGCTAAAGGAAAGTTAGTTGTTAAAAAGACAGATGACCAG
AACAAACCACTTTCAAAAGCTACCTTTGTTTTAAAAACTACTGCTCATCCAGAAAGTAAAATAGAAAAAGTAACT
GCTGAGCTAACAGGTGAAGCTACTTTTGATAATCTCATACCTGGAGATTATACTTTATCAGAAGAAACAGCGCCC
GAAGGTTATAAAAAGACTAACCAGACTTGGCAAGTTAAGGTTGAGAGTAATGGAAAAACTACGATACAAAATAGT
GGTGATAAAAATTCCACAATTGGACAAAATCAGGAAGAACTAGATAAGCAGTATCCCCCCACAGGAATTTATGAA
GATACAAAGGAATCTTATAAACTTGAGCATGTTAAAGGTTCAGTTCCAAATGGAAAGTCAGAGGCAAAAGCAGTT
AACCCATATTCAAGTGAAGGTGAGCATATAAGAGAAATTCCAGAGGGAACATTATCTAAACGTATTTCAGAAGTA
GGTGATTTAGCTCATAATAAATATAAAATTGAGTTAACTGTCAGTGGAAAAACCATAGTAAAACCAGTGGACAAA
CAAAAGCCGTTAGATGTTGTCTTCGTACTCGATAATTCTAACTCAATGAATAACGATGGCCCAAATTTTCAAAGG
CATAATAAAGCCAAGAAAGCTGCCGAAGCTCTTGGGACCGCAGTAAAAGATATTTTAGGAGCAAACAGTGATAAT
AGGGTTGCATTAGTTACCTATGGTTCAGATATTTTTGATGGTAGGAGTGTAGATGTCGTAAAAGGATTTAAAGAA
GATGATAAATATTATGGCCTTCAAACTAAGTTCACAATTCAGACAGAGAATTATAGTCATAAACAATTAACAAAT
AATGCTGAAGAGATTATAAAAAGGATTCCGACAGAAGCTCCTAAAGCTAAGTGGGGATCTACTACCAATGGATTA
ACTCCAGAGCAACAAAAGGAGTACTATCTTAGTAAAGTAGGAGAAACATTTACTATGAAAGCCTTCATGGAGGCA
GATGATATTTTGAGTCAAGTAAATCGAAATAGTCAAAAAATTATTGTTCATGTAACTGATGGTGTTCCTACGAGA
TCATATGCTATTAATAATTTTAAACTGGGTGCATCATATGAAAGCCAATTTGAACAAATGAAAAAAAATGGATAT
CTAAATAAAAGTAATTTTCTACTTACTGATAAGCCCGAGGATATAAAAGGAAATGGGGAGAGTTACTTTTTGTTT
CCCTTAGATAGTTATCAAACACAGATAATCTCTGGAAACTTACAAAAACTTCATTATTTAGATTTAAATCTTAAT
TACCCTAAAGGTACAATTTATCGAAATGGACCAGTGAAAGAACATGGAACACCAACCAAACTTTATATAAATAGT
TTAAAACAGAAAAATTATGACATTTTTAATTTTGGTATCGATATATCTGGTTTTAGACAAGTTTATAATGAGGAG
TATAAGAAAAATCAAGATGGTACTTTTCAAAAATTGAAAGAGGAAGCTTTTAAACTTTCAGATGGAGAAATCACA
GAACTAATGAGGTCGTTCTCTTCCAAACCTGAGTACTACACCCCTATCGTAACTTCAGCCGATACATCTAACAAT
GAAATTTTATCTAAAATTCAGCAACAATTTGAAACGATTTTAACAAAAGAAAACTCAATTGTTAATGGAACTATC
GAAGATCCTATGGGTGATAAAATCAATTTACAGCTTGGTAATGGACAAACATTACAGCCAAGTGATTATACTTTA
CAGGGAAATGATGGAAGTGTAATGAAGGATGGTATTGCAACTGGTGGGCCTAATAATGATGGTGGAATACTTAAG
GGGGTTAAATTAGAATACATCGGAAATAAACTCTATGTTAGAGGTTTGAATTTAGGAGAAGGTCAAAAAGTAACA
CTCACATATGATGTGAAACTAGATGACAGTTTTATAAGTAACAAATTCTATGACACTAATGGTAGAACAACATTG
AATCCTAAGTCAGAGGATCCTAATACACTTAGAGATTTTCCAATCCCTAAAATTCGTGATGTGAGAGAATATCCT
ACAATAACGATTAAAAACGAGAAGAAGTTAGGTGAAATTGAATTTATAAAAGTTGATAAAGATAATAATAAGTTG
CTTCTCAAAGGAGCTACGTTTGAACTTCAAGAATTTAATGAAGATTATAAACTTTATTTACCAATAAAAAATAAT
AATTCAAAAGTAGTGACGGGAGAAAACGGCAAAATTTCTTACAAAGATTTGAAAGATGGCAAATATCAGTTAATA
GAAGCAGTTTCGCCGGAGGATTATCAAAAAATTACTAATAAACCAATTTTAACTTTTGAAGTGGTTAAAGGATCG
ATAAAAAATATAATAGCTGTTAATAAACAGATTTCTGAATATCATGAGGAAGGTGACAAGCATTTAATTACCAAC
ACGCATATTCCACCAAAAGGAATTATTCCTATGACAGGTGGGAAAGGAATTCTATCTTTCATTTTAATAGGTGGA
GCTATGATGTCTATTGCAGGTGGAATTTATATTTGGAAAAGGTATAAGAAATCTAGTGATATGTCCATCAAAAAA
GAT
SEQ ID NO: 16
MRKYQKFSKILTLSLFCLSQIPLNTNVLGESTVPENGAKGKLVVKKTDDQNKPLSKATFVLKTTAHPESKIEKVT
AELTGEATFDNLIPGDYTLSEETAPEGYKKTNQTWQVKVESNGKTTIQNSGDKNSTIGQNQEELDKQYPPTGIYE
DTKESYKLEHVKGSVPNGKSEAKAVNPYSSEGEHIREIPEGTLSKRISEVGDLAHNKYKIELTVSGKTIVKPVDK
QKPLDVVFVLDNSNSMNNDGPNFQRHNKAKKAAEALGTAVKDILGANSDNRVALVTYGSDIFDGRSVDVVKGFKE
DDKYYGLQTKFTIQTENYSHKQLTNNAEEIIKRIPTEAPKAKWGSTTNGLTPEQQKEYYLSKVGETFTMKAFMEA
DDILSQVNRNSQKIIVHVTDGVPTRSYAINNFKLGASYESQFEQMKKNGYLNKSNFLLTDKPEDIKGNGESYFLF
PLDSYQTQIISGNLQKLHYLDLNLNYPKGTIYRNGPVKEHGTPTKLYINSLKQKNYDIFNFGIDISGFRQVYNEE
YKKNQDGTFQKLKEEAFKLSDGEITELMRSFSSKPEYYTPIVTSADTSNNEILSKIQQQFETILTKENSIVNGTI
EDPMGDKINLQLGNGQTLQPSDYTLQGNDGSVMKDGIATGGPNNDGGILKGVKLEYIGNKLYVRGLNLGEGQKVT
LTYDVKLDDSFISNKFYDTNGRTTLNPKSEDPNTLRDFPIPKIRDVREYPTITIKNEKKLGEIEFIKVDKDNNKL
LLKGATFELQEFNEDYKLYLPIKNNNSKVVTGENGKISYKDLKDGKYQLIEAVSPEDYQKITNKPILTFEVVKGS
IKNIIAVNKQISEYHEEGDKHLITNTHIPPKGIIPMTGGKGILSFILIGGAMMSIAGGIYIWKRYKKSSDMSIKK
D

[0908] GBS 067 contains a C-terminus transmembrane region which is indicated by the underlined region closest to the C-terminus of SEQ ID NO: 16 above. In one embodiment, one or more amino acids from the transmembrane region is removed and or the amino acid is truncated before the

[symbol]

17.

SEQ ID NO: 17

MRKYQKFSKILTLSLFCLSQIPLNTNVLGESTVPENGAKGKLVVKKTDDQ
NKPLSKATFVLKTTAHPESKIEKVTAELTGEATFDNLIPGDYTLSEETAP
EGYKKTNQTWQVKVESNGKTTIQNSGDKNSTIGQNQEELDKQYPPTGIYE
DTKESYKLEHVKGSVPNGKSEAKAVNPYSSEGEHIREIPEGTLSKRISEV
GDLAHNKYKIELTVSGKTIVKPVDKQKPLDVVFVLDNSNSMNNDGPNFQR
HNKAKKAAEALGTAVKDILGANSDNRVALVTYGSDIFDGRSVDVVKGFKE
DDKYYGLQTKFTIQTENYSHKQLTNNAEEIIKRIPTEAPKAKWGSTTNGL
TPEQQKEYYLSKVGETFTMKAFMEADDILSQVNRNSQKIIVHVTDGVPTR
SYAINNFKLGASYESQFEQMKKNGYLNKSNFLLTDKPEDIKGNGESYFLF
PLDSYQTQIISGNLQKLHYLDLNLNYPKGTIYRNGPVKEHGTPTKLYINS
LKQKNYDIFNFGIDISGFRQVYNEEYKKNQDGTFQKLKEEAFKLSDGEIT
ELMRSFSSKPEYYTPIVTSADTSNNEILSKIQQQFETILTKENSIVNGTI
EDPMGDKINLQLGNGQTLQPSDYTLQGNDGSVMKDGIATGGPNNDGGILK
GVKLEYIGNKLYVRGLNLGEGQKVTLTYDVKLDDSFISNKFYDTNGRTTL
NPKSEDPNTLRDFPIPKIRDVREYPTITIKNEKKLGEIEFIKVDKDNNKL
LLKGATFELQEFNEDYKLYLPIKNNNSKVVTGENGKISYKDLKDGKYQLI
EAVSPEDYQKITNKPILTFEVVKGSIKNIIAVNKQISEYHEEGDKHLITN
THIPPKGIIPMTGGKGILS

[0909] GBS 067 contains an amino acid motif indicative of a cell wall anchor (an LPXTG (SEQ ID NO: 122) motif): SEQ ID NO: 18 IPMTG. (shown in italics in SEQ ID NO: 16 above). In some recombinant host cell systems, it may be preferable to remove this motif to facilitate secretion of a recombinant GBS 067 protein from the host cell. Accordingly, in one preferred fragment of GBS 067 for use in the invention, the transmembrane and the cell wall anchor motif are removed from GBS 67. An example of such a GBS 067 fragment is set forth below as SEQ ID NO: 19.

SEQ ID NO: 19

MRKYQKFSKILTLSLFCLSQIPLNTNVLGESTVPENGAKGKLVVKKTDDQ
NKPLSKATFVLKTTAHPESKIEKVTAELTGEATFDNLIPGDYTLSEETAP
EGYKKTNQTWQVKVESNGKTTIQNSGDKNSTIGQNQEELDKQYPPTGIYE
DTKESYKLEHVKGSVPNGKSEAKAVNPYSSEGEHIREIPEGTLSKRISEV
GDLAHNKYKIELTVSGKTIVKPVDKQKPLDVVFVLDNSNSMNNDGPNFQR
HNKAKKAAEALGTAVKDILGANSDNRVALVTYGSDIFDGRSVDVVKGFKE
DDKYYGLQTKFTIQTENYSHKQLTNNAEEIIKRIPTEAPKAKWGSTTNGL
TPEQQKEYYLSKVGETFTMKAFMEADDILSQVNRNSQKIIVHVTDGVPTR
SYAINNFKLGASYESQFEQMKKNGYLNKSNFLLTDKPEDIKGNGESYFLF
PLDSYQTQIISGNLQKLHYLDLNLNYPKGTIYRNGPVKEHGTPTKLYINS
LKQKNYDIFNFGIDISGFRQVYNEEYKKNQDGTFQKLKEEAFKLSDGEIT
ELMRSFSSKPEYYTPIVTSADTSNNEILSKIQQQFETILTKENSIVNGTI
EDPMGDKINLQLGNGQTLQPSDYTLQGNDGSVMKDGIATGGPNNDGGILK
GVKLEYIGNKLYVRGLNLGEGQKVTLTYDVKLDDSFISNKFYDTNGRTTL
NPKSEDPNTLRDFPIPKIRDVREYPTITIKNEKKLGEIEFIKVDKDNNKL
LLKGATFELQEFNEDYKLYLPIKNNNSKVVTGENGKISYKDLKDGKYQLI
EAVSPEDYQKITNKPILTFEVVKGSIKNIIAVNKQISEYHEEGDKHLITN
THIPPKGI

[0910] Alternatively, in some recombinant host cell systems, it may be preferable to use the cell wall anchor motif to anchor the recombinantly expressed protein to the cell wall. The extracellular domain of the expressed protein may be cleaved during purification or the recombinant protein may be left attached to either inactivated host cells or cell membranes in the final composition.

[0911] Three pilin motif, containing conserved lysine (K) residues have been identified in GBS 67. The pilin motif sequences are underlined in SEQ ID NO: 16, below. Conserved lysine (K) residues are marked in bold, at amino acid residues 478 and 488, at amino acid residues 340 and 342, and at amino acid residues 703 and 717. The pilin sequences, in particular the conserved lysine residues, are thought to be important for the formation of oligomeric, pilus-like structures of GBS 67. Preferred fragments of GBS 67 include at least one conserved lysine residue. Preferably, fragments include at least one pilin sequence.

SEQ ID NO: 16

MRKYQKFSKILTLSLFGLSQIPLNTNVLGESTVPENGAKGKLVVKKTDDQ
NKPLSKATFVLKTTAHPESKIEKVTAELTGEATFDNLIPGDYTLSEETAP
EGYKKTNQTWQVKVESNGKTTIQNSGDKNSTIGQNQEELDKQYPPTGIYE
DTKESYKLEHVKGSVPNGKSEAKAVNPYSSEGEHIREIPEGTLSKRISEV
GDLAHNKYKIELTVSGKTIVKPVDKQKPLDVVFVLDNSNSMNNDGPNFQR
HNKAKKAAEALGTAVKDILGANSDNRVALVTYGSDIFDGRSVDVVKGFKE
DDKYYGLQTKFTIQTENYSHKQLTNNAEEIIKRIPTEAPKAKWGSTTNGL
TPEQQKEYYLSKVGETFTMKAFMEADDILSQVNRNSQKIIVHVTDGVPTR
SYAINNFKLGASYESQFEQMKKNGYLNKSNFLLTDKPEDIKGNGESYFLF
PLDSYQTQIISGNLQKLHYLDLNLNYPKGTIYRNGPVKEHGTPTKLYINS
LKQKNYDIFNFGIDISGFRQVYNEEYKKNQDGTFQKLKEEAFKLSDGEIT
ELMRSFSSKPEYYTPIVTSADTSNNEILSKIQQQFETILTKENSIVNGTI
EDPMGDKINLQLGNGQTLQPSDYTLQGNDGSVMKDGIATGGPNNDGGILK
GVKLEYIGNKLYVRGLNLGEGQKVTLTYDVKLDDSFISNKFYDTNGRTTL
NPKSEDPNTLRDFPIPKIRDVREYPTITIKNEKKLGEIEFIKVDKDNNKL
LLKGATFELQEFNEDYKLYLPIKNNNSKVVTGENGKISYKDLKDGKYQLI
EAVSPEDYQKITNKPILTFEVVKGSIKNIIAVNKQISEYHEEGDKHLITN
THIPPKGIIPMTGGKGILSFILIGGAMMSIAGGIYIWKRYKKSSDMSIKK
D

[0912] Two E boxes containing conserved glutamic residues have also been identified in GBS 67. The E box motifs are underlined in SEQ ID NO: 16 below. The conserved glutamic acid (E) residues, at amino acid residues 96 and 801, are marked in bold. The E box motifs, in particular the conserved glutamic acid residues, are thought to be important for the formation of oligomeric pilus-like structures of GBS 67. Preferred fragments of GBS 67 include at least one conserved glutamic acid residue. Preferably, fragments include at least one E box motif.

SEQ ID NO: 16

MRKYQKFSKILTLSLFCLSQIPLNTNVLGESTVPENGAKGKLVVKKTDDQ
NKPLSKATFVLKTTAHPESKIEKVTAELTGEATFDNLIPGDYTLSEETAP
EGYKKTNQTWQVKVESNGKTTIQNSGDKNSTIGQNQEELDKQYPPTGIYE
DTKESYKLEHVKGSVPNGKSEAKAVNPYSSEGEHIREIPEGTLSKRISEV
GDLAHNKYKIELTVSGKTIVKPVDKQKPLDVVFVLDNSNSMNNDGPNFQR
HNKAKKAAEALGTAVKDILGANSDNRVALVTYGSDIFDGRSVDVVKGFKE
DDKYYGLQTKFTIQTENYSHKQLTNNAEEIIKRIPTEAPKAKWGSTTNGL
TPEQQKEYYLSKVGETFTMKAFMEADDILSQVNRNSQKIIVHVTDGVPTR
SYAINNFKLGASYESQFEQMKKNGYLNKSNFLLTDKPEDIKGNGESYFLF
PLDSYQTQIISGNLQKLHYLDLNLNYPKGTIYRNGPVKEHGTPTKLYINS
LKQKNYDIFNFGIDISGFRQVYNEEYKKNQDGTFQKLKEEAFKLSDGEIT
ELMRSFSSKPEYYTPIVTSADTSNNEILSKIQQQFETILTKENSIVNGTI
EDPMGDKINLQLGNGQTLQPSDYTLQGNDGSVMKDGIATGGPNNDGGILK
GVKLEYIGNKLYVRGLNLGEGQKVTLTYDVKLDDSFISNKFYDTNGRTTL
NPKSEDPNTLRDFPIPKIRDVREYPTITIKNEKKLGEIEFIKVDKDNNKL
LLKGATFELQEFNEDYKLYLPIKNNNSKVVTGENGKISYKDLKDGKYQLI
EAVSPEDYQKITNKPILTFEVVKGSIKNIIAVNKQISEYHEEGDKHLITN
THIPPKGIIPMTGGKGILSFILIGGAMMSIAGGIYIWKRYKKSSDMSIKK
D

[0913] Predicted secondary structure for the GBS 067 amino acid sequence is set forth in FIG. 33. As shown in this figure, GBS 067 contains several regions predicted to form alpha helical structures. Such alpha helical regions are likely to form coiled-coil structures and may be involved in oligomerization of GBS 067.

[0914] The amino acid sequence for GBS 067 also contains a region which is homologous to the Cna_B domain of the Staphylococcus aureus collagen-binding surface protein (pfam05738). Although the Cna_B region is not thought to mediate collagen binding, it is predicted to form a beta sandwich structure. In the Staph aureus protein, this beta sandwich structure is through to form a stalk that presents the ligand binding domain away from the bacterial cell surface. This same amino acid sequence region is also predicted to be an outer membrane protein involved in cell envelope biogenesis.

[0915] The amino acid sequence for GBS 067 contains a region which is homologous to a von Willebrand factor (vWF) type A domain. The vWF type A domain is present at amino acid residues 229-402 of GBS 067 as shown in SEQ ID NO: 16. This type of sequence is typically found in

[symbol]

collagen, fibronectin, and fibrinogen, discussed above.

[0916] Because applicants have identified GBS 67 as a surface exposed protein on GBS and because GBS 67 may be involved in GBS adhesion the immunogenicity of the GBS 67 protein was examined in mice. The results of an immunization assay with GBS 67 are set forth in Table 48, below.

TABLE 48
GBS 67 Protects Mice in an Immunization Assay

| Challenge | GBS 67 immungen | | | | |
|---|---|---|---|---|---|
| GBS strain | | % | PBS immunogen | | FACS |
| (serotype) | dead/treated | survival | dead/treated | % survival | Δmean |
| 3050 (II) | 0/30 | 100 | 29/49 | 41 | 460 |
| CJB111 (V) | 76/185 | 59 | 143/189 | 24 | 481 |
| 7357 b (Ib) | 34/56 | 39 | 65/74 | 12 | 316 |

[0917] As shown in Table 48, immunization with GBS 67 provides a substantially improved survival rate for challenged mice relative to negative control, PBS, immunized mice. These results indicate that GBS 67 may comprise an immunogenic composition of the invention.

### GBS 59

[0918] The following offers examples of GBS 59 fragments. Nucleotide and amino acid sequences of GBS 59 sequenced from serotype V isolated strain 2603 are set forth below as SEQ ID NOS: 125 and 126. The GBS 59 polypeptide of SEQ ID NO: 126 is referred to as SAG1407.

SEQ ID NO: 125

ttaagcttcctttgattggcgtcttttcatgataactactgctccaagca
taatgcttaaaccaataattgtgaaaagaattgtaccaataccacctgtt
tgtgggattgttacctttttattttctacacgtgtcgcatctttttggtt
gctgttagcaacgtagtcaatgttaccacctgttatgtatgacccttgat
taactacaaacttaatattacctgccaacttagcaaatcctgctggagca
agtgtttcttcaaggttgtaagtaccgtctgcaagacctqtaacttcaaa
ttgaccttgatcgtttgaagtgtaggtaatggctctagccttatctgtta
tccactcataagctgtacgagcctcaatgaaggctgcatcgtaatctgct
tgtttagttttgataagttcttttgcagtaattcctttttcacctttttg
gtctgttgcagacaacttgttataagcagcgatagcttcatctaaagcta
ttttcttagcagctaaagttttttgaccttctgattgatctgctttaaga
gcaaggtatttacctgctgagtttttcacaacgaattgtgcaccagccaa
acggtcaccttgttcattagttttgacaaatttcttaccatgagtttcaa
cttttggttcagttgggttcaatggtgttgggttatcagaatctttggta
ttggtaatggttactttaccattttctagatttattgcacttccgtaacc
agaaacacgttctgagatcatgtatgatttgttttctagaccagtgaatt
tacccgagaagttaccagatacttcaaatttgataccatttccaaggtcg
attgtacctttagatgtttttgtcaatgatactgaagcaacagttttatc
tttatctttcaatgtgtaaacaacgtttacaccatcaggtgcaattccgt
cagaccaagttttagcaactgttacttcaccctttgaaggtgtaacagga
agttcagtcaagtctttacctggtttgttaccatacgacaatttgatatc
attggattctggattatcaataattgcttgaccattaacagtagcactat
aagtcaatgtaaattcaatatcagctgttttagctgctttttccaatttg
cccaatccatcagctgtgaattttaatgtgaaaccacgggcatcaatgct
aagttcatagtctgtatccttagcaaaagtttctgtagttcctgaagctt
taaggctaacagttgaacccattgtcaaaccatttgacattatatctgtc
caaaccaagttttcgtatttagaacctttgtgaatttttgttttaacttc
ataaggaacaactttaccgatttcagcagtagcagttgctttgtcacgtg
cataattaccataatttgcgccagctgtcaaaagtctattaacatctgtc
aatgctgtcaaatcgtttgttttagcaaagtttttatcaatttctggttt
ttcttcagtgttctttggataaacatgggcatcagcaacaacaccatctt
catttaccaatggaagagtgatgttaactggaaccgcttttgaagcagcc
aggagggaaccattattgttgtaagtagattttgatttaacttcaacaat
tttaaactcgcctttcaatcctttggtgttgaaaacaagtccagtatctc
cctctggtgtcaatccagacacggcctcatcaatatttactgttatttca
ggagtaccatctttattaattaaggctggtgttaatttgttaccttcttt
tgccttaacatattgcactttaccacttttatcttctttcaaagctaaag
caaagaacgcaccttcgatttctttagatccctcgccaaagtaaccagca
aggtcagaaatagctccacctttgtagtcttttccgttaagacctgtagt
tcctgggaagttacttttgttaagatttgattcggtttgcaaaatcttgt
gcaaagtcactgtattagttgttgcttcatccgcaaaggctggtgcaact
gagagcaatgacgttaaagtcagtaacaatgccgagaacattgcaaaata
tttgttgattcttttcat

SEQ ID NO: 126

MKRINKYFAMFSALLLTLTSLLSVAPAFADEATTNTVTLHKILQTESNLN
KSNFPGTTGLNGKDYKGGAISDLAGYFGEGSKEIEGAFFALALKEDKSGK
VQYVKAKEGNKLTPALINKDGTPEITVNIDEAVSGLTPEGDTGLVFNTKG
LKGEFKIVEVKSKSTYNNNGSLLAASKAVPVNITLPLVNEDGVVADAHVY
PKNTEEKPEIDKNFAKTNDLTALTDVNRLLTAGANYGNYARDKATATAEI
GKVVPYEVKTKIHKGSKYENLVWTDIMSNGLTMGSTVSLKASGTTETFAK
DTDYELSIDARGFTLKFTADGLGKLEKAAKTADIEFTLTYSATVNGQAII
DNPESNDIKLSYGNKPGKDLTELPVTPSKGEVTVAKTWSDGIAPDGVNVV
YTLKDKDKTVASVSLTKTSKGTIDLGNGIKFEVSGNFSGKFTGLENKSYM
ISERVSGYGSAINLENGKVTITNTKDSDNPTPLNPTEPKVETHGKKFVKT
NEQGDRLAGAQFVVKNSAGKYLALKADQSEGQKTLAAKKIALDEAIAAYN
KLSATDQKGEKGITAKELIKTKQADYDAAFIEARTAYEWITDKARAITYT
SNDQGQFEVTGLADGTYNLEETLAPAGFAKLAGNIKFVVNQGSYITGGNI
DYVANSNQKDATRVENKKVTIPQTGGIGTILFTIIGLSIMLGAVVIMKRR
QSKEA

[0919] Nucleotide and amino acid sequences of GBS 59 sequenced from serotype V isolated strain CJB111 are set forth below as SEQ ID NOS: 127 and 128. The GBS 59 polypeptide of SEQ ID NO: 128 is referred to as BO1575.

SEQ ID NO: 127

ATGAAAAAAATCAACAAATGTCTTACAATGTTCTCGACACTGCTATTGAT
CTTAACGTCACTATTCTCAGTTGCACCAGCGTTTGCGGACGACGCAACAA
CTGATACTGTGACCTTGCACAAGATTGTCATGCCACAAGCTGCATTTGAT
AACTTTACTGAAGGTACAAAAGGTAAGAATGATAGCGATTATGTTGGTAA
ACAAATTAATGACCTTAAATCTTATTTTGGCTCAACCGATGCTAAAGAAA
TCAAGGGTGCTTTCTTTGTTTTCAAAAATGAAACTGGTACAAAATTCATT
ACTGAAAATGGTAAGGAAGTCGATACTTTGGAAGCTAAAGATGCTGAAGG
TGGTGCTGTTCTTTCAGGGTTAACAAAAGACAATGGTTTTGTTTTTAACA
CTGCTAAGTTAAAAGGAATTTACCAAATCGTTGAATTGAAAGAAAAATCA
AACTACGATAACAACGGTTCTATCTTGGCTGATTCAAAAGCAGTTCCAGT
TAAAATCACTCTGCCATTGGTAAACAACCAAGGTGTTGTTAAAGATGCTC
ACATTTATCCAAAGAATACTGAAACAAAACCACAAGTAGATAAGAACTTT
GCAGATAAAGATCTTGATTATACTGACAACCGAAAAGACAAAGGTGTTGT
CTCAGCGACAGTTGGTGACAAAAAAGAATACATAGTTGGAACAAAAATTC
TTAAAGGCTCAGACTATAAGAAACTGGTTTGGACTGATAGCATGACTAAA
GGTTTGACGTTCAACAACAACGTTAAAGTAACATTGGATGGTGAAGATTT
TCCTGTTTTAAACTACAAACTCGTAACAGATGACCAAGGTTTCCGTCTTG
CCTTGAATGCAACAGGTCTTGCAGCAGTAGCAGCAGCTGCAAAAGACAAA
GATGTTGAAATCAAGATCACTTACTCAGCTACGGTGAACGGCTCCACTAC
TGTTGAAATTCCAGAAACCAATGATGTTAAATTGGACTATGGTAATAACC
CAACGGAAGAAAGTGAACCACAAGAAGGTACTCCAGCTAACCAAGAAATT
AAAGTCATTAAAGACTGGGCAGTAGATGGTACAATTACTGATGCTAATGT
TGCAGTTAAAGCTATCTTTACCTTGCAAGAAAAACAAACGGATGGTACAT
GGGTGAACGTTGCTTCACACGAAGCAACAAAACCATCACGCTTTGAACAT
ACTTTCACAGGTTTGGATAATGCTAAAACTTACCGCGTTGTCGAACGTGT
TAGCGGCTACACTCCAGAATACGTATCATTTAAAAATGGTGTTGTGACTA
TCAAGAACAACAAAAACTCAAATGATCCAACTCCAATCAACCCATCAGAA
CCAAAAGTGGTGACTTATGGACGTAAATTTGTGAAAACAAATCAAGCTAA
CACTGAACGCTTGGCAGGAGCTACCTTCCTCGTTAAGAAAGAAGGCAAAT
ACTTGGCACGTAAAGCAGGTGCAGCAACTGCTGAAGCAAAGGCAGCTGTA
AAAACTGCTAAACTAGCATTGGATGAAGCTGTTAAAGCTTATAACGACTT
GACTAAAGAAAAACAAGAAGGCCAAGAAGGTAAAACAGCATTGGCTACTG
TTGATCAAAAACAAAAAGCTTACAATGACGCTTTTGTTAAAGCTAACTAC
TCATATGAATGGGTTGCAGATAAAAAGGCTGATAATGTTGTTAAATTGAT
CTCTAACGCCGGTGGTCAATTTGAAATTACTGGTTTGGATAAAGGCACTT
ATGGCTTGGAAGAAACTCAAGCACCAGCAGGTTATGCGACATTGTCAGGT
GATGTAAACTTTGAAGTAACTGCCACATCATATAGCAAAGGGGCTACAAC
TGACATCGCATATGATAAAGGCTCTGTAAAAAAAGATGCCCAACAAGTTC
AAAACAAAAAAGTAACCATCCCACAAACAGGTGGTATTGGTACAATTCTT
TTCACAATTATTGGTTTAAGCATTATGCTTGGAGCAGTAGTTATCATGAA
AAAACGTCAATCAGAGGAAGCTTAA

SEQ ID NO: 128

MKKINKCLTMFSTLLLILTSLFSVAPAFADDATTDTVTLHKIVMPQAAFD
NFTEGTKGKNDSDYVGKQINDLKSYFGSTDAKEIKGAFFVFKNETGTKFI
TENGKEVDTLEAKDAEGGAVLSGLTKDNGFVFNTAKLKGIYQIVELKEKS
NYDNNGSILADSKAVPVKITLPLVNNQGVVKDAHIYPKNTETKPQVDKNF
ADKDLDYTDNRKDKGVVSATVGDKKEYIVGTKILKGSDYKKLVWTDSMTK
GLTFNNNVKVTLDGEDFPVLNYKLVTDDQGFRLALNATGLAAVAAAAKDK
DVEIKITYSATVNGSTTVEIPETNDVKLDYGNNPTEESEPQEGTPANQEI
KVIKDWAVDGTITDANVAVKAIFTLQEKQTDGTWVNVASHEATKPSRFEH
TFTGLDNAKTYRVVERVSGYTPEYVSFKNGVVTIKNNKNSNDPTPINPSE
PKVVTYGRKFVKTNQANTERLAGATFLVKKEGKYLARKAGAATAEAKAAV
KTAKLALDEAVKAYNDLTKEKQEGQEGKTALATVDQKQKAYNDAFVKANY
SYEWVADKKADNVVKLISNAGGQFEITGLDKGTYGLEETQAPAGYATLSG
DVNFEVTATSYSKGATTDIAYDKGSVKKDAQQVQNKKVTIPQTGGIGTIL
FTIIGLSIMLGAVVIMKKRQSEEA

[symbol]

ID NO: 129 IPQTG (shown in italics in SEQ ID NOs: 126 and 128 above). In some recombinant host cell systems, it may be preferable to remove this motif to facilitate secretion of a recombinant GBS 59 protein from the host cell. Alternatively, in some recombinant host cell systems, it may be preferable to use the cell wall anchor motif to anchor the recombinantly expressed protein to the cell wall. The extracellular domain of the expressed protein may be cleaved during purification or the recombinant protein may be left attached to either inactivated host cells or cell membranes in the final composition.

[0920] Pilin motifs, containing conserved lysine (K) residues have been identified in the GBS 59 polypeptides. The pilin motif sequences are underlined in each of SEQ ID NOs: 126 and 128, below. Conserved lysine (K) residues are marked in bold. The conserved lysine (K) residues are located at amino acid residues 202 and 212 and amino acid residues 489 and 495 of SEQ ID NO: 126 and at amino acid residues 188 and 198 of SEQ ID NO: 128. The pilin sequences, in particular the conserved lysine residues, are thought to be important for the formation of oligomeric, pilus-like structures of GBS 59. Preferred fragments of GBS 59 include at least one conserved lysine residue. Preferably, fragments include at least one pilin sequence.

SEQ ID NO: 126

MKRINKYFAMFSALLLTLTSLLSVAPAFADEATTNTVTLHKILQTESNLN
KSNFPGTTGLNGKDYKGGAISDLAGYFGEGSKEIEGAFFALALKEDKSGK
VQYVKAKEGNKLTPALINKDGTPEITVNIDEAVSGLTPEGDTGLVFNTKG
LKGEFKIVEVKSKSTYNNNGSLLAASKAVPVNITLPLVNEDGVVADAHVY
PKNTEEKPEIDKNFAKTNDLTALTDVNRLLTAGANYGNYARDKATATAEI
GKVVPYEVKTKIHKGSKYENLVWTDIMSNGLTMGSTVSLKASGTTETFAK
DTDYELSIDARGFTLKFTADGLGKLEKAAKTADIEFTLTYSATVNGQAII
DNPESNDIKLSYGNKPGKDLTELPVTPSKGEVTVAKTWSDGIAPDGVNVV
YTLKDKDKTVASVSLTKTSKGTIDLGNGIKFEVSGNFSGKFTGLENKSYM
ISERVSGYGSAINLENGKVTITNTKDSDNPTPLNPTEPKVETHGKKFVKT
NEQGDRLAGAQFVVKNSAGKYLALKADQSEGQKTLAAKKIALDEAIAAYN
KLSATDQKGEKGITAKELIKTKQADYDAAFIEARTAYEWITDKARAITYT
SNDQGQFEVTGLADGTYNLEETLAPAGFAKLAGNIKFVVNQGSYITGGNI
DYVANSNQKDATRVENKKVTIPQTGGIGTILFTIIGLSIMLGAVVIMKRR
QSKEA

SEQ ID NO: 128

MKKINKCLTMFSTLLLILTSLFSVAPAFADDATTDTVTLHKIVMPQAAFD
NFTEGTKGKNDSDYVGKQINDLKSYFGSTDAKEIKGAFFVFKNETGTKFI
TENGKEVDTLEAKDAEGGAVLSGLTKDNGFVFNTAKLKGIYQIVELKEKS
NYDNNGSILADSKAVPVKITLPLVNNQGVVKDAHIYPKNTETKPQVDKNF
ADKDLDYTDNRKDKGVVSATVGDKKEYIVGTKILKGSDYKKLVWTDSMTK
GLTFNNNVKVTLDGEDFPVLNYKLVTDDQGFRLALNATGLAAVAAAAKDK
DVEIKITYSATVNGSTTVEIPETNDVKLDYGNNPTEESEPQEGTPANQEI
KVIKDWAVDGTITDANVAVKAIFTLQEKQTDGTWVNVASHEATKPSRFEH
TFTGLDNAKTYRVVERVSGYTPEYVSFKNGVVTIKNNKNSNDPTPINPSE
PKVVTYGRKFVKTNQANTERLAGATFLVKKEGKYLARKAGAATAEAKAAV
KTAKLALDEAVKAYNDLTKEKQEGQEGKTALATVDQKQKAYNDAFVKANY
SYEWVADKKADNVVKLISNAGGQFEITGLDKGTYGLEETQAPAGYATLSG
DVNFEVTATSYSKGATTDIAYDKGSVKKDAQQVQNKKVTIPQTGGIGTIL
FTIIGLSIMLGAVVIMKKRQSEEA

[0921] An E box containing a conserved glutamic residue has also been identified in each of the GBS 59 polypeptides. The E box motif is underlined in each of SEQ ID NOs: 126 and 128 below. The conserved glutamic acid (E) is marked in bold at amino acid residue 621 in SEQ ID NO: 126 and at amino acid residue 588 in SEQ ID NO: 128. The E box motif, in particular the conserved glutamic acid residue, is thought to be important for the formation of oligomeric pilus-like structures of GBS 59. Preferred fragments of GBS 59 include the conserved glutamic acid residue. Preferably, fragments include the E box motif.

SEQ ID NO: 126

MKRINKYFAMFSALLLTLTSLLSVAPAFADEATTNTVTLHKILQTESNLN
KSNFPGTTGLNGKDYKGGAISDLAGYFGEGSKEIEGAFFALALKEDKSGK
VQYVKAKEGNKLTPALINKDGTPEITVNIDEAVSGLTPEGDTGLVFNTKG
LKGEFKIVEVKSKSTYNNNGSLLAASKAVPVNITLPLVNEDGVVADAHVY
PKNTEEKPEIDKNFAKTNDLTALTDVNRLLTAGANYGNYARDKATATAEI
GKVVPYEVKTKIHKGSKYENLVWTDIMSNGLTMGSTVSLKASGTTETFAK
DTDYELSIDARGFTLKFTADGLGKLEKAAKTADIEFTLTYSATVNGQAII
DNPESNDIKLSYGNKPGKDLTELPVTPSKGEVTVAKTWSDGIAPDGVNVV
YTLKDKDKTVASVSLTKTSKGTIDLGNGIKFEVSGNFSGKFTGLENKSYM
ISERVSGYGSAINLENGKVTITNTKDSDNPTPLNPTEPKVETHGKKFVKT
NEQGDRLAGAQFVVKNSAGKYLALKADQSEGQKTLAAKKIALDEAIAAYN
KLSATDQKGEKGITAKELIKTKQADYDAAFIEARTAYEWITDKARAITYT
SNDQGQFEVTGLADGTYNLEETLAPAGFAKLAGNIKFVVNQGSYITGGNI
DYVANSNQKDATRVENKKVTIPQTGGIGTILFTIIGLSIMLGAVVIMKRR
QSKEA

SEQ ID NO: 128

MKKINKCLTMFSTLLLILTSLFSVAPAFADDATTDTVTLHKIVMPQAAFD
NFTEGTKGKNDSDYVGKQINDLKSYFGSTDAKEIKGAFFVFKNETGTKFI
TENGKEVDTLEAKDAEGGAVLSGLTKDNGFVFNTAKLKGIYQIVELKEKS
NYDNNGSILADSKAVPVKITLPLVNNQGVVKDAHIYPKNTETKPQVDKNF
ADKDLDYTDNRKDKGVVSATVGDKKEYIVGTKILKGSDYKKLVWTDSMTK
GLTFNNNVKVTLDGEDFPVLNYKLVTDDQGFRLALNATGLAAVAAAAKDK
DVEIKITYSATVNGSTTVEIPETNDVKLDYGNNPTEESEPQEGTPANQEI
KVIKDWAVDGTITDANVAVKAIFTLQEKQTDGTWVNVASHEATKPSRFEH
TFTGLDNAKTYRVVERVSGYTPEYVSFKNGVVTIKNNKNSNDPTPINPSE
PKVVTYGRKFVKTNQANTERLAGATFLVKKEGKYLARKAGAATAEAKAAV
KTAKLALDEAVKAYNDLTKEKQEGQEGKTALATVDQKQKAYNDAFVKANY
SYEWVADKKADNVVKLISNAGGQFEITGLDKGTYGLEETQAPAGYATLSG
DVNFEVTATSYSKGATTDIAYDKGSVKKDAQQVQNKKVTIPQTGGIGTIL
FTIIGLSIMLGAVVIMKKRQSEEA

[0922] Female mice were immunized with either SAG1407 (SEQ ID NO: 126) or BO1575 (SEQ ID NO: 128) in an active maternal immunization assay. Pups bred from the immunized female mice survived GBS challenge better than control (PBS) treated mice. Results of the active maternal immunization assay using the GBS 59 immunogenic compositions are shown in Table 17, below.

TABLE 17
Active maternal immunization assay for GBS 59

| Challenge | GBS 59 | | PBS | | |
|---|---|---|---|---|---|
| GBS strain | | Survival | | Survival | |
| (serotype) | Dead/treated | (%) | Dead/treated | (%) | FACS |
| CJB111 (V)* | 7/20 | 65 | 41/49 | 16 | 493 |
| 18RS21 (II)** | 18/30 | 40 | 39/40 | 2.5 | 380 |

*immunized with BO1575
**immunized with SAG1407

[0923] Opsonophagocytosis assays also demonstrated that antibodies against BO1575 are opsonic for GBS serotype V, strain CJB111. See FIG. 67.

### GBS 52

[0924] Examples of polynucleotide and amino acid sequences for GBS 52 are set forth below. SEQ ID NO: 20 and 21 represent GBS 52 sequences from GBS serotype V, strain isolate 2603.

SEQ ID NO: 20

ATGAAACAAACATTAAAACTTATGTTTTCTTTTCTGTTGATGTTAGGGAC
TATGTTTGGAATTAGCCAAACTGTTTTAGCGCAAGAAACTCATCAGTTGA
CGATTGTTCATCTTGAAGCAAGGGATATTGATCGTCCAAATCCACAGTTG
GAGATTGCCCCTAAAGAAGGGACTCCAATTGAAGGAGTACTCTATCAGTT
GTACCAATTAAAATCAACTGAAGATGGCGATTTGTTGGCACATTGGAATT
CCCTAACTATCACAGAATTGAAAAAACAGGCGCAGCAGGTTTTTGAAGCC
ACTACTAATCAACAAGGAAAGGCTACATTTAACCAACTACCAGATGGAAT
TTATTATGGTCTGGCGGTTAAAGCCGGTGAAAAAAATCGTAATGTCTCAG
CTTTCTTGGTTGACTTGTCTGAGGATAAAGTGATTTATCCTAAAATCATC
TGGTCCACAGGTGAGTTGGACTTGCTTAAAGTTGGTGTGGATGGTGATAC
CAAAAAACCACTAGCAGGCGTTGTCTTTGAACTTTATGAAAAGAATGGTA
GGACTCCTATTCGTGTGAAAAATGGGGTGCATTCTCAAGATATTGACGCT
GCAAAACATTTAGAAACAGATTCATCAGGGCATATCAGAATTTCCGGGCT
CATCCATGGGGACTATGTCTTAAAAGAAATCGAGACACAGTCAGGATATC
AGATCGGACAGGCAGAGACTGCTGTGACTATTGAAAAATCAAAAACAGTA
AGAGTAACGATTCAAAATAAAAAAGTTCCGACACCTAAAGTGCCATCTCG
AGGAGGTCTTATTCCCAAAACAGGTGAGCAACAGGCAATGGCACTTGTAA
TTATTGGTGGTATTTTAATTGCTTTAGCCTTACGATTACTATCAAAACAT
CGGAAACATCAAAATAAGGAT

SEQ ID NO: 21

MKQTLKLMESFLLMLGTMFGISQTVLAQETHQLTIVHLEARDIDRPNPQL
EIAPKEGTPIEGVLYQLYQLKSTEDGDLLAHWNSLTITELKKQAQQVFEA
TTNQQGKATFNQLPDGIYYGLAVKAGEKNRHVSAFLVDLSEDKVIYPKII
WSTGELDLLKVGVDGDTKKPLAGVVFELYEKNGRTPIRVKNGVHSQDIDA
AKHLETDSSGHIRISGLIHGDYVLKEIETQSGYQIGQAETAVTIEKSKTV
TVTIENKKVPTPKVPSRGGLIPKTGEQQAMALVIIGGILIALALRLLSKH
RKHQNKD

[0925] GBS 52 contains an amino acid motif indicative of a cell wall anchor: SEQ ID NO: 124 IPKTG (shown in italics in SEQ ID NO: 21, above). In some recombinant host cell systems, it may be preferable to remove this motif to facilitate secretion of a recombinant GBS 52 protein from the host cell. Alternatively, in other recombinant host cell systems, it may be preferable to use the cell wall anchor motif to anchor the recombinantly expressed protein to the cell wall. The extracellular domain of the expressed protein may be cleaved during purification or the recombinant protein may be left attached to either inactivated host cells or cell membranes in the final composition.

[0926] A pilin motif, discussed above, containing a conserved lysine (K) residue has also been identified in GBS 52. The pilin motif sequence is underlined in SEQ ID NO: 21, below. Conserved lysine (K) residues are also marked in bold, at amino acid residues 148 and 160. The pilin sequence, in particular the conserved lysine residues, are thought to be important for the formation of oligomeric, pilus-like structures. Preferred fragments of GBS 52 include at least one conserved lysine residue. Preferably, fragments include the pilin sequence.

SEQ ID NO: 21

MKQTLKLMFSFLLMLGTMFGISQTVLAQETHQLTIVHLEARDIDRPNPQL
EIAPKEGTPIEGVLYQLYQLKSTEDGDLLAHWNSLTITELKKQAQQVFEA
TTNQQGKATFNQLPDGIYYGLAVKAGEKNRNVSAFLVDLSEDKVIYPKII
WSTGELDLLKVGVDGDTKKPLAGVVFELYEKNGRTPIRVKNGVHSQDIDA
AKHLFTDSSGHIRISGLIHGDYVLKEIETQSGYQIGQAETAVTIEKSKTV
TVTIENKKVPTPKVPSRGGLIPKTGEQQAMALVIIGGILIALALRLLSKH
RKHQNKD

[0927] An E box containing a conserved glutamic residue has been identified in GBS 52. The E-box motif is underlined in SEQ ID NO: 21, below. The conserved glutamic acid (E), at amino acid residue 226, is marked in bold. The E box motif, in particular the conserved glutamic acid residue, is thought to be important for the formation of oligomeric pilus-like structures of GBS 52. Preferred fragments of GBS 52 include the conserved glutamic acid residue. Preferably, fragments include the E box motif.

SEQ ID NO: 21

MKQTLKLMFSFLLMLGTMFGISQTVLAQETHQLTIVHLEARDIDRPNPQL
EIAPKEGTPIEGVLYQLYQLKSTEDGDLLAHWNSLTITELKKQAQQVFEA
TTNQQGKATFNQLPDGIYYGLAVKAGEKNRNVSAFLVDLSEDKVIYPKII
WSTGELDLLKVGVDGDTKKPLAGVVFELYEKNGRTPIRVKNGVHSQDIDA
AKHLETDSSGHIRISGLIHGDYVLKEIETQSGYQIGQAETAVTIEKSKTV
TVTIENKKVPTPKVPSRGGLIPKTGEQQAMALVIIGGILIALALRLLSKH
RKHQNKD

### SAG0647

[0928] SEQ ID NO: 22 and 23 represent SAG0647 sequences from GBS serotype V, strain isolate 2603.

SEQ ID NO: 22

ATGGGACAAAAATCAAAAATATCTCTAGCTACGAATATTCGTATATGGAT
TTTTCGTTTAATTTTCTTAGCGGGTTTCCTTGTTTTGGCATTTCCCATCG
TTAGTCAGGTCATGTACTTTCAAGCCTCTCACGCCAATATTAATGCTTTT
AAAGAAGCTGTTACCAAGATTGACCGGGTGGAGATTAATCGGCGTTTAGA
ACTTGCTTATGCTTATAACGCCAGTATAGCAGGTGCCAAAACTAATGGCG
AATATCCAGCGCTTAAAGACCCCTACTCTGCTGAACAAAAGCAGGCAGGG
GTCGTTGAGTACGCCCGCATGCTTGAAGTCAAAGAACAAATAGGTCATGT
GATTATTCCAAGAATTAATCAGGATATCCCTATTTACGCTGGCTCTGCTG
AAGAAAATCTTCAGAGGGGCGTTGGACATTTAGAGGGGACCAGTCTTCCA
GTCGGTGGTGAGTCAACTCATGCCGTTCTAACTGCCCATCGAGGGCTACC
AACGGCCAAGCTATTTACCAATTTAGACAAGGTAACAGTAGGTGACCGTT
TTTACATTGAACACATCGGCGGAAAGATTGCTTATCAGGTAGACCAAATC
AAAGTTATCGCCCCTGATCAGTTAGAGGATTTGTACGTGATTCAAGGAGA
AGATCACGTCACCCTATTAACTTGCACACCTTATATGATAAATAGTCATC
GCCTCCTCGTTCGAGGCAAGCGAATTCCTTATGTGGAAAAAACAGTGCAG
AAAGATTCAAAGACCTTCAGGCAACAACAATACCTAACCTATGCTATGTG
GGTAGTCGTTGGACTTATCTTGCTGTCGCTTCTCATTTGGTTTAAAAAGA
CGAAACAGAAAAAGCGGAGAAAGAATGAAAAAGCGGCTAGTCAAAATAGT
CACAATAATTCGAAATAA

SEQ ID NO: 23

MGQKSKISLATNIRIWIFRLIFLAGFLVLAFPIVSQVMYFQASHANINAF
KEAVTKIDRVEINRRLELAYAYNASIAGAKTNGEYPALKDPYSAEQKQAG
VVEYARMLEVKEQIGHVIIPRINQDIPIYAGSAEENLQRGVGHLEGTSLP
VGGESTHAVLTAHRGLPTAKLFTNLDKVTVGDRFYIEHIGGKIAYQVDQI
KVIAPDQLEDLYVIQGEDHVTLLTCTPYMINSHRLLVRGKRIPYVEKTVQ
KDSKTFRQQQYLTYAMWVVVGLILLSLLIWFKKTKQKKRRKNEKAASQNS
HNNSK

### SAG0648

[0929] Examples of polynucleotide and amino acid sequences for SAG0648 are set forth below. SEQ ID NO: 24 and 25 represent SAG0648 sequences from GBS serotype V, strain isolate 2603.

SEQ ID NO: 24

ATGGGAAGTCTGATTCTCTTATTTCCGATTGTGAGCCAGGTAAGTTACTA
CCTTGCTTCGCATCAAAATATTAATCAATTTAAGCGGGAAGTCGCTAAGA
TTGATACTAATACGGTTGAACGACGCATCGCTTTAGCTAATGCTTACAAT
GAGACGTTATCAAGGAATCCCTTGCTTATAGACCCTTTTACCAGTAAGCA
AAAAGAAGGTTTGAGAGAGTATGCTCGTATGCTTGAAGTTCATGAGCAAA
TAGGTCATGTGGCAATCCCAAGTATTGGGGTTGATATTCCAATTTATGCT
GGAACATCCGAAACTGTGCTTCAGAAAGGTAGTGGGCATTTGGAGGGAAC
CAGTCTTCCAGTGGGAGGTTTGTCAACCCATTCAGTACTAACTGCCCACC
GTGGCTTGCCAACAGCTAGGCTATTTACCGACTTAAATAAAGTTAAAAAA
GGCCAGATTTTCTATGTGACGAACATCAAGGAAACACTTGCCTACAAAGT
CGTGTCTATCAAAGTTGTGGATCCAACAGCTTTAAGTGAGGTTAAGATTG
TCAATGGTAAGGATTATATAACCTTGCTGACTTGCACACCTTACATGATC
AATAGTCATCGTCTCTTGGTAAAAGGAGAGCGTATTCCTTATGATTCTAC
CGAGGCGGAAAAGCACAAAGAACAAACCGTACAAGATTATCGTTTGTCAC
TAGTGTTGAAGATACTACTAGTATTATTAATTGGACTCTTCATCGTGATA
ATGATGAGAAGATGGATGCAACATCGTCAATAA

SEQ ID NO: 25

MGSLILLFPIVSQVSYYLASHQNINQFKREVAKIDTNTVERRIALANAYN
ETLSRNPLLIDPFTSKQKEGLREYARMLEVHEQIGHVAIPSIGVDIPIYA
GTSETVLQKGSGHLEGTSLPVGGLSTHSVLTAHRGLPTARLFTDLNKVKK
GQIFYVTNIKETLAYKVVSIKVVDPTALSEVKIVNGKDYITLLTCTPYMI
NSHRLLVKGERIPYDSTEAEKHKEQTVQDYRLSLVLKILLVLLIGLFIVI
MMRRWMQHRQ

### GBS 150

[0930] Examples of polynucleotide and amino acid sequences for GBS 150 are set forth below. SEQ ID NO: 26 and 27 represent GBS 150 sequences from GBS serotype V, strain isolate 2603.

SEQ ID NO: 26

ATGAAAAAGATTAGAAAAAGTTTAGGACTTCTACTATGTTGCTTTTTAGG
ATTGGTACAATTAGCGTTTTTTTCGGTAGCCAGTGTAAATGCTGATACCC
CTAATCAACTAACAATCACACAGATAGGACTTCAGCCAAATACTACAGAG
GAGGGGATTTCTTATCGTTTATGGACTGTGACTGACAACTTAAAAGTTGA
TTTATTGAGCCAAATGACAGATAGCGAATTGAACCAGAAGTATAAGAGTA
TCTTGACTTCTCCTACTGATACTAATGGTCAGACAAAGATAGCACTCCCA
AATGGTTCGTACTTTGGTCGTGCTTATAAAGCTGATCAAAGCGTTTCAAC
AATAGTACCTTTTTATATTGAATTACCAGATGATAAGTTATCAAATCAAT
TACAGATAAATCCTAAGCGAAAAGTTGAAACAGGCCGATTAAAACTTATT
AAATATACAAAACAACGAAAGATAAAGAAAAGGCTATCCGGAGTAATATT
TGTATTATACGATAACCAGAATCAGCCAGTTCGCTTTAAAAATGGACGAT
TTACGACCGATCAAGATGGGATTACTTCATTAGTAACTGATGATAAGGGA
GAAATTGAGGTTGAAGGTTTATTACCTGGTAAGTATATTTTTCGAGAAGC
AAAAGCACTAACTGGTTACCGTATATCTATGAAGGATGCTGTAGTTGCTG
TAGTTGCTAATAAAACACAGGAAGTAGAGGTAGAAAACGAAAAAGAAACT
CCTCCACCAACAAATCCTAAACCATCACAACCGCTTTTTCCACAATCATT
TCTTCCTAAAACAGGAATGATTATTGGTGGAGGACTGACAATTCTTGGTT
GTATTATTTTGGGAATTTTGTTTATCTTTTTAAGAAAAACTAAAAATAGC
AAATCTGAAAGAAACGATACAGTA

SEQ ID NO: 27

MKKIRKSLGLLLCCFLGLVQLAFFSVASVNADTPNQLTITQIGLQPNTTE
EGISYRLWTVTDNLKVDLLSQMTDSELNQKYKSILTSPTDTNGQTKIALP
NGSYFGRAYKADQSVSTIVPFYIELPDDKLSNQLQINPKRKVETGRLKLI
KYTKEGKIKKRLSGVIFVLYDNQNQPVRFKNGRFTTDQDGITSLVTDDKG
EIEVEGLLPGKYIFREAKALTGYRISMKDAVVAVVANKTQEVEVENEKET
PPPTNPKPSQPLFPQSFLPKTGMIIGGGLTILGCIILGILFIFLRKTKNS
KSERNDTV

[0931] GBS 150 contains an amino acid motif indicative of a cell wall anchor: SEQ ID NO: 130 LPKTG (shown in italics in SEQ ID NO: 27 above). In some recombinant host cell systems, it may be preferable to remove this motif to facilitate secretion of a recombinant GBS 150 protein from the host cell. Alternatively, in other recombinant host cell systems, it may be preferable to use the cell wall anchor motif to anchor the recombinantly expressed protein to the cell wall. The extracellular domain of the expressed protein may be cleaved during purification or the recombinant protein may be left attached to either inactivated host cells or cell membranes in the final composition.

[0932] As discussed above, a pilin motif, containing a conserved lysine (K) residue has been identified in GBS 150. The pilin motif sequence is underlined in SEQ ID NO: 27, below. Conserved lysine (K) residues are marked in bold, at amino acid residues 139 and 148. The pilin sequence, in particular the conserved lysine residues, are thought to be important for the formation of oligomeric, pilus-like structures of GBS 150. Preferred fragments of GBS 150 include a conserved lysine residue. Preferably, fragments include the pilin sequence.

SEQ ID NO: 27

MKKIRKSLGLLLCCFLGLVQLAFFSVASVNADTPNQLTITQIGLQPNTTE
EGISYRLWTVTDNLKVDLLSQMTDSELNQKYKSILTSPTDTNGQTKIALP
NGSYFGRAYKADQSVSTIVPFYIELPDDKLSNQLQINPKRKVETGRLKLI
KYTKEGKIKKRLSGVIFVLYDNQNQPVRFKNGRFTTDQDGITSLVTDDKG
EIEVEGLLPGKYIFREAKALTGYRISMKDAVVAVVANKTQEVEVENEKET
PPPTNPKPSQPLFPQSFLPKTGMIIGGGLTILGCIILGILFIFLRKTKNS
KSERNDTV

[0933] An E box containing a conserved glutamic residue has also been identified in GBS 150. The E box motif is underlined in SEQ ID NO: 27 below. The conserved glutamic acid (E), at amino acid residue 216, is marked in bold. The E box motif, in particular the conserved glutamic acid residue, is thought to be important for the formation of oligomeric pilus-like structures of GBS 150. Preferred fragments of GBS 150 include the conserved glutamic acid residue. Preferably, fragments include the E box motif.

SEQ ID NO: 27
MKKIRKSLGLLLCCFLGLVQLAFFSVASVNADTPNQLTITQIGLQPNTTEEGISYRLWTVTDNLKVDLLSQMTDS
ELNQKYKSILTSPTDTNGQTKIALPNGSYFGRAYKADQSVSTIVPFYIELPDDKLSNQLQINPKRKVETGRLKLI
KYTKEGKIKKRLSGVIFVLYDNQNQPVRFKNGRFTTDQDGITSLVTDDKGEIEVEGLLPGKYIFREAKALTGYRI
SMKDAVVAVVANKTQEVEVENEKETPPPTNPKPSQPLFPQSFLPKTGMIIGGGLTILGCIILGILFIFLRKTKNS
KSERNDTV

### SAG1405

[0934] SEQ ID NO: 28 and 29 represent SAG1405 sequences from GBS serotype V, strain isolate 2603.

SEQ ID NO: 28
ATGGGAGGAAAATTTCAGAAAAACCTTAAGAAATCGGTCGTTTTAAATCGATGGATGAATGTAGGCTTGATACTA
TTGTTCTTAGTTGGTCTTTTGATAACCTCATATCCTTTTATTTCAAATTGGTACTATAATATTAAAGCTAATAAT
CAAGTAACTAACTTTGATAATCAAACCCAAAAATTAAATACTAAAGAGATTAATAGACGATTTGAGTTAGCAAAA
GCTTATAATAGAACACTGGACCCAAGCCGCCTATCAGATCCCTATACTGAAAAAGAAAAAAAAGGTATTGCTGAA
TACGCCCACATGCTTGAGATTGCTGAAATGATTGGATATATTGATATACCGTCTATCAAGCAAAAATTACCTATC
TATGCGGGGACTACCAGTAGTGTTCTTGAAAAAGGAGCAGGACACCTTGAAGGAACCTCCTTGCCAATTGGTGGA
AAAAGTTCACATACTGTTATCACAGCTCATCGCGGCTTACCTAAAGCTAAGTTATTTACAGATTTAGATAAACTT
AAAAAAGGAAAAATTTTTTATATTCATAATATCAAAGAAGTTTTAGCCTATAAGGTTGATCAAATAAGTGTTGTA
AAGCCAGATAATTTTTCTAAATTATTGGTTGTTAAAGGTAAGGATTATGCGACTTTGCTAACATGTACACCTTAT
TCGATTAATTCACATCGTTTACTAGTTAGAGGGCATCGAATCAAGTATGTACCTCCTGTTAAAGAAAAGAACTAT
TTAATGAAAGAATTGCAAACACACTATAAACTTTATTTCCTCTTATCAATCCTAGTTATTCTTATATTAGTCGCT
TTACTATTATATTTAAAACGAAAATTTAAAGAGAGAAAGAGAAAGGGAAATCAAAAATGA
SEQ ID NO: 29
MGGKFQKNLKKSVVLNRWMNVGLILLFLVGLLITSYPFISNWYYNIKANNQVTNFDNQTQKLNTKEINRRFELAK
AYNRTLDPSRLSDPYTEKEKKGIAEYAHMLEIAEMIGYIDIPSIKQKLPIYAGTTSSVLEKGAGHLEGTSLPIGG
KSSHTVITAHRGLPKAKLFTDLDKLKKGKIFYIHNIKEVLAYKVDQISVVKPDNFSKLLVVKGKDYATLLTCTPY
SINSHRLLVRGHRIKYVPPVKEKNYLMKELQTHYKLYFLLSILVILILVALLLYLKRKFKERKRKGNQK

### SAG1406

[0935] Examples of polynucleotide and amino acid sequences for SAG1405 are set forth below. SEQ ID NO: 30 and 31 represent SAG1405 sequences from GBS serotype V, strain isolate 2603.

SEQ ID NO: 30
GTGAAGACTAAAAAAATCATCAAAAAAACAAAAAAAAAGAAGAAGTCAAATCTTCCTTTTATCATTCTTTTTCTA
ATAGGTCTATCTATTTTATTGTATCCAGTGGTATCACGTTTTTACTATACGATAGAATCTAATAATCAAACACAG
GATTTTGAGAGAGCTGCTAAAAAACTTAGTCAGAAAGAAATCAATCGACGTATGGCTCTAGCACAAGCTTATAAT
GATTCTTTAAATAATGTCCATCTTGAAGATCCTTATGAGAAAAAACGAATTCAAAAGGGGGTAGCAGAGTACGCC
CGTATGTTAGAGGTAAGTGAAAAAATCGGAACAATTTCAGTTCCTAAGATAGGTCAAAAACTCCCTATATTTGCA
GGTTCAAGTCAAGAAGTTCTATCTAAAGGAGCAGGGCATTTAGAAGGTACCTCTCTTCCAATTGGGGGCAATAGT
ACACATACTGTTATAACAGCGCATTCAGGAATTCCAGATAAAGAACTCTTTTCTAACCTTAAAAAGTTAAAAAAA
GGAGATAAGTTTTATATTCAAAACATAAAAGAAACGATAGCATATCAAGTAGATCAGATAAAAGTCGTTACACCC
GATAACTTTTCAGATTTGTTGGTTGTTCCTGGACATGATTATGCAACCTTATTGACTTGCACCCCGATTATGATC
AATACACACAGACTTTTAGTAAGGGGACATCGTATCCCTTATAAAGGTCCTATTGATGAAAAATTAATAAAAGAC
GGTCATTTAAACACGATTTATAGATATCTATTCTATATATCTTTAGTTATTATTGCTTGGTTACTTTGGTTAATA
AAACGTCAACGTCAAAAAAATCGTTTAGCAAGTGTTAGAAAAGGAATTGAATCATAA
SEQ ID NO: 31
MKTKKIIKKTKKKKKSNLPFIILFLIGLSILLYPVVSRFYYTIESNNQTQDFERAAKKLSQKEINRRMALAQAYN
DSLNNVHLEDPYEKKRIQKGVAEYARMLEVSEKIGTISVPKIGQKLPIFAGSSQEVLSKGAGHLEGTSLPIGGNS
THTVITAHSGIPDKELFSNLKKLKKGDKFYIQNIKETIAYQVDQIKVVTPDNFSDLLVVPGHDYATLLTCTPIMI
NTHRLLVRGHRIPYKGPIDEKLIKDGHLNTIYRYLFYISLVIIAWLLWLIKRQRQKNRLASVRKGIES

01520

[0936] An example of an amino acid sequence for 01520 is set forth below. SEQ ID NO: 32 represents a 01520 sequence from GBS serotype III, strain isolate COH1.

SEQ ID NO: 32
MIRRYSANFLAILGIILVSSGIYWGWYNINQAHQADLTSQHIVKVLDKSITHQVKGSENGELPVKKLDKTDYLGT
LDIPNLKLHLPVAANYSFEQLSKTPTRYYGSYLTNNMVICAHNFPYHFDALKNVDMGTDVYFTTTTGQIYHYKIS
NREIIEPTAIEKVYKTATSDNDWDLSLFTCTKAGVARVLVRCQLIDVKN

01521 [symbol]
represents a 01521 sequence from GBS serotype III, strain isolate COH1.

SEQ ID NO: 33
MIYKKILKITLLLLFSLSTQLVSADTNDQMKTGSITIQNKYNNQGIAGGNLLVYQVAQAKDVDGNQVFTLTTPFQ
GIGIKDDDLTQVNLDSNQAKYVNLLTKAVHKTQPLQTFDNLPAEGIVANNLPQGIYLFIQTKTAQGYELMSPFIL
SIPKDGKYDITAFEKMSPLNAKPKKEETITPTVTHQTKGKLPFTGQVWWPIPILIMSGLLCLIIALKWRRRRD

[0937] 01521 contains an amino acid motif indicative of a cell wall anchor: SEQ ID NO: 132 LPFTG (shown in italics in SEQ ID NO: 33 above). In some recombinant host cell systems, it may be preferable to remove this motif to facilitate secretion of a recombinant 01521 protein from the host cell. Alternatively, it may be preferable to use the cell wall anchor motif to anchor the recombinantly expressed protein to the cell wall. The extracellular domain of the expressed protein may be cleaved during purification or the recombinant protein may be left attached to either inactivated host cells or cell membranes in the final composition.

[0938] Two pilin motifs, containing conserved lysine (K) residues have been identified in 01521. The pilin motif sequences are underlined in SEQ ID NO: 33, below. Conserved lysine (K) residues are marked in bold, at amino acid residues 154 and 165 and at amino acid residues 174 and 188. The pilin sequences, in particular the conserved lysine residues, are thought to be important for the formation of oligomeric, pilus-like structures of 01521. Preferred fragments of 01521 include at least one conserved lysine residue. Preferably, fragments include at least one pilin sequence.

SEQ ID NO: 33
MIYKKILKITLLLLFSLSTQLVSADTNDQMKTGSITIQNKYNNQGIAGGNLLVYQVAQAKDVDGNQVFTLTTPFQ
GIGIKDDDLTQVNLDSNQAKYVNLLTKAVHKTQPLQTFDNLPAEGIVANNLPQGIYLFIQTKTAQGYELMSPFIL
SIPKDGKYDITAFEKMSPLNAKPKKEETITPTVTHQTKGKLPFTGQVWWPIPILIMSGLLCLIIALKWRRRRD

[0939] An E box containing a conserved glutamic residue has also been identified in 01521. The E box motif is underlined in SEQ ID NO: 33 below. The conserved glutamic acid (E), at amino acid residue 177, is marked in bold. The E box motif, in particular the conserved glutamic acid residue, is thought to be important for the formation of oligomeric pilus-like structures of 01521. Preferred fragments of 01521 include the conserved glutamic acid residue. Preferably, fragments include the E box motif.

SEQ ID NO: 33
MIYKKILKITLLLLFSLSTQLVSADTNDQMKTGSITIQNKYNNQGIAGGNLLVYQVAQAKDVDGNQVFTLTTPFQ
GIGIKDDDLTQVNLDSNQAKYVNLLTKAVHKTQPLQTFDNLPAEGIVANNLPQGIYLFIQTKTAQGYELMSPFIL
SIPKDGKYDITAFEKMSPLNAKPKKEETITPTVTHQTKGKLPFTGQVWWPIPILIMSGLLCLIIALKWRRRRD

01522

[0940] An example of an amino acid sequence for 01522 is set forth below. SEQ ID NO: 34 represents a 01522 sequence from GBS serotype III, strain isolate COH1.

SEQ ID NO: 34
MAYPSLANYWNSFHQSRAIMDYQDRVTHMDENDYKKIINRAKEYNKQFKTSGMKWHMTSQERLDYNSQLAIDKTG
NMGYISIPKINIKLPLYHGTSEKVLQTSIGHLEGSSLPIGGDSTHSILSGHRGLPSSRLFSDLDKLKVGDHWTVS
ILNETYTYQVDQIRTVKPDDLRDLQIVKGKDYQTLVTCTPYGVNTHRLLVRGHRVPNDNGNALVVAEAIQIEPIY
IAPFIAIFLTLILLLISLEVTRRARQRKKILKQAMRKEENNDL

01523 [symbol]
represents a 01523 sequence from GBS serotype III, strain isolate COH1.

SEQ ID NO: 35
MKKKMIQSLLVASLAFGMAVSPVTPIAFAAETGTITVQDTQKGATYKAYKVFDAEIDNANVSDSNKDGASYLIPQ
GKEAEYKASTDFNSLFTTTTNGGRTYVTKKDTASANEIATWAKSISANTTPVSTVTESNNDGTEVINVSQYGYYY
VSSTVNNGAVIMVTSVTPANTIHEKNTDATWGDGGGKTVDQKTYSVGDTVKYTITYKNAVNYHGTEKVYQYVIKD
TMPSASVVDLNEGSYEVTITDGSGNITTLTQGSEKATGKYNLLEENNNFTITIPWAATNTPTGNTQNGANDDFFY
KGINTITVTYTGVLKSGAKPGSADLPENTNIATINPWTSNDDPGQKVTVRDGQITIKKIDGSTKASLQGAIFVLK
NATGQFLNFNDTNNVEWGTEANATEYTTGADGIITITGLKEGTYYLVEKKAPLGYNLLDNSQKVILGDGATDTTN
SDNLLVNPTVENNKGTELPSTGGIGTTIFYIIGAILVIGAGIVLVARRRLRS

[0941] 01523 contains an amino acid motif indicative of a cell wall anchor: SEQ ID NO: 131 LPSTG (shown in italics in SEQ ID NO: 35 above). In some recombinant host cell systems, it may be preferable to remove this motif to facilitate secretion of a recombinant 01523 protein from the host cell. Alternatively, it may be preferable to use the cell wall anchor motif to anchor the recombinantly expressed protein to the cell wall. The extracellular domain of the expressed protein may be cleaved during purification or the recombinant protein may be left attached to either inactivated host cells or cell membranes in the final composition.

[0942] An E box containing a conserved glutamic residue has also been identified in 01523. The E box motif is underlined in SEQ ID NO: 35 below. The conserved glutamic acid (E), at amino acid residue 423, is marked in bold. The E box motif, in particular the conserved glutamic acid residue, is thought to be important for the formation of oligomeric pilus-like structures of 01523. Preferred fragments of 01523 include the conserved glutamic acid residue. Preferably, fragments include the E box motif.

SEQ ID NO: 35
MKKKMIQSLLVASLAFGMAVSPVTPIAFAAETGTITVQDTQKGATYKAYKVFDAEIDNANVSDSNKDGASYLIPQ
GKEAEYKASTDFNSLFTTTTHGGRTYVTKKDTASANEIATWAKSISANTTPVSTVTESNNDGTEVINVSQYGYYY
VSSTVNNGAVIMVTSVTPNATIHEKNTDATWGDGGGKTVDQKTYSVGDTVKYTITYKNAVNYHGTEKVYQYVIKD
TMPSASVVDLNEGSYEVTITDGSGNITTLTQGSEKATGKYNLLEENNNFTITIPWAATNTPTGNTQNGANDDFFY
KGINTITVTYTGVLKSGAKPGSADLPENTNIATINPNTSNDDPGQKVTVRDGQITIKKIDGSTKASLQGAIFVLK
NATGQFLNFNDTNNVEWGTEANATEYTTGADGIITITGLKEGTYYLVEKKAPLGYNLLDNSQKVILGDGATDTTN
SDNLLVNPTVENNKGTELPSTGGIGTTIFYIIGAILVIGAGIVLVARRRLRS

01524

[0943] An example of an amino acid sequence for 01524 is set forth below. SEQ ID NO: 36 represents a 01524 sequence from GBS serotype III, strain isolate COH1.

SEQ ID NO: 36
MLKKCQTFIIESLKKKKHPKEWKIIMWSLMILTTFLTTYFLILPAITVEETKTDDVGITLENKNSSQVTSSTSSS
QSSVEQSKPQTPASSVTETSSSEEAAYREEPLMFRGADYTVTVTLTKEAKIPKNADLKVTELKDNSATFKDYKKK
ALTEVAKQDSEIKNFKLYDITIESNGKEAEPQAPVKVEVNYDKPLEASDENLKVVHFKDDGQTEVLKSKDTAETK
NTSSDVAFKTDSFSIYAIVQEDHTEVPRLTYHFQNNDGTDYDFLTASGMQVHHQIIKDGESLGEVGIPTIKAGEH
FNGWYTYDPTTGKYGDPVKFGEPITVTETKEICVRPFMSKVATVTLYDDSAGKSILERYQVPLDSSGNGTADLSS
FKVSPPTSTLLFVGWSKTQNGAPLSESEIQALPVSSDISLYPVFKESYGVEFNTGDLSTGVTYIAPRRVLTGQPA
STIKPNDPTRPGYTFAGWYTAASGGAAFDFNQVLTKDTTLYAHWSPAQTTYTINYWQQSATDNKNATDAQKTYEY
AGQVTRSGLSLSNQTLTQQDINDKLPTGFKVNNTRTETSVMIKDDGSSVVNVYYDRKLITIKFAKYGGYSLPEYY
YSYNWSSDADTYTGLYGTTLAANGYQWKTGAWGYLANVGNNQVGTYGMSYLGEFILPNDTVDSDVIKLFPKGNIV
QTYRFFKQGLDGTYSLADTGGGAGADEFTFTEKYLGFNVKYYQRLYPDNYLFDQYASQTSAGVKVPISDEYYDRY
GAYHKDYLNLVVWYERNSYKIKYLDPLDNTELPNFPVKDVLYEQNLSSYAPDTTTVQPKPSRPGYVWDGKWYKDQ
AQTQVFDFNTTMPPHDVKVYAGWQKVTYRVNIDPNGGRLSKTDDTYLDLHYGDRIPDYTDITRDYIQDPSGTYYY
KYDSRDKDPDSTKDAYYTTDTSLSNVDTTTKYKYVKDAYKLVGWYYVNPDGSIRPYNFSGAVTQDINLRAIWRKA
GDYSIIYSNDAVGTDGKPALDASGQQLQTSNEPTDPDSYDDGSHSALLRRPTMPDGYRFRGWWYNGKIYNPYDSI
DIDAHLADANKNITIKPVIIPVGDIKLEDTSIKYNGNGGTRVENGNVVTQVETPRMELNSTTTIPENQYFTRTGY
NLIGWHHDKDLADTGRVEFTAGQSIGIDNNPDATNTLYAVWQPKEYTVRVSKTVVGLDEDKTKDFLFNPSETLQQ
ENFPLRDGQTKEFKVPYGTSISIDEQAYDEFKVSESITEKNLATGEADKTYDATGLQSLTVSGDVDISFTNTRIK
QKVRLQKVNVENDNNFLAGAVFDIYESDANGNKASHPMYSGLVTNDKGLLLVDANNYLSLPVGKYYLTETKAPPG
YLLPKNDISVLVISTGVTFEQNGNNATPIKENLVDGSTVYTFKITNSKGTELPSTGGIGTHIYILVGLALALPSG
LILYYRKKI

[0944] 01524 contains an amino acid motif indicative of a cell wall anchor. SEQ ID NO: 131 LPSTG (shown in italics in SEQ ID NO: 36 above). In some recombinant host cell systems, it may be preferable to remove this motif to facilitate secretion of a recombinant 01524 protein from the host cell. Alternatively, it may be preferable to use the cell wall anchor motif to anchor the recombinantly expressed protein to the cell wall. The extracellular domain of the expressed protein may be cleaved during purification or the recombinant protein may be left attached to either inactivated host cells or cell membranes in the final composition.

[0945] Three pilin motifs, containing conserved lysine (K) residues have been identified in 01524. The pilin motif sequences are underlined in SEQ ID NO: 36, below. Conserved lysine (K) residues are marked in bold, at amino acid residues 128 and 138, amino acid residues 671 and 682, and amino acid residues 809 and 820. The pilin sequences, in particular the conserved lysine residues, are thought to be important for the formation of oligomeric, pilus-like structures of 01524. Preferred fragments of 01524 include at least one conserved lysine residue. Preferably, fragments include at least one pilin sequence.

SEQ ID NO: 36
MLKKCQTFIIESLKKKKHPKEWKIIMWSLMILTTFLTTYELILPAITVEETKTDDVGITLENKNSSQVTSSTSSS
QSSVEQSKPQTPASSVTETSSSEEAAYREEPLMFRGADYTVTVTLTKEAKIPKNADLKVTELKDNSATFKDYKKK
ALTEVAKQDSEIKNFKLYDITIESNGKEAEPQAPVKVEVNYDKPLEASDENLKVVHFKDDGQTEVLKSKDTAETK
NTSSDVAFKTDSFSIYAIVQEDNTEVPRLTYHFQNNDGTDYDFLTASGMQVHHQIIKDGESLGEVGIPTIKAGEH
FNGWYTYDPTTGKYGDPVKFGEPITVTETKEICVRPFMSKVATVTLYDDSAGKSILERYQVPLDSSGNGTADLSS
FKVSPPTSTLLFVGWSKTQNGAPLSESEIQALPVSSDISLYPVFKESYGVEFNTGDLSTGVTYIAPRRVLTGQPA
STIKPNDPTRPGYTFAGWYTAASGGAAFDFNQVLTKDTTLYAHWSPAQTTYTINYWQQSATDNKNATDAQKTYEY
AGQVTRSGLSLSNQTLTQQDINDKLPTGFKVNNTRTETSVMIKDDGSSVVNVYYDRKLITIKFAKYGGYSLPEYY
YSYNWSSDADTYTGLYGTTLAANGYQWKTGAWGYLANVGNNQVGTYGMSYLGEFILPNDTVDSDVIKLFPKGNIV
QTYRFFKQGLDGTYSLADTGGGAGADEFTFTEKYLGFNVKYYQRLYPDNYLFDQYASQTSAGVKVPISDEYYDRY
GAYHKDYLNLVVWYERNSYKIKYLDPLDNTELPNFPVKDVLYEQNLSSYAPDTTTVQPKPSRPGYVWDGKWYKDQ
AQTQVFDFNTTMPPHDVKVYAGWQKVTYRVNIDPNGGRLSKTDDTYLDLHYGDRIPDYTDITRDYIQDPSGTYYY
KYDSRDKDPDSTKDAYYTTDTSLSNVDTTTKYKYVKDAYKLVGWYYVNPDGSIRPYNFSGAVTQDINLRAIWRKA
GDYHIIYSNDAVGTDGKPALDASGQQLQTSNEPTDPDSYDDGSHSALLRRPTMPDGYRFRGWWYNGKIYNPYDSI
DIDAHLADANKNITIKPVIIPVGDIKLEDTSIKYNGNGGTRVENGNVVTQVETPRMELNSTTTIPENQYFTRTGY
NLIGWHHDKDLADTGRVEFTAGQSIGIDNNPDATNTLYAVWQPKEYTVRVSKTVVGLDEDKTKDELFNPSETLQQ
ENFPLRDGQTKEFKVPYGTSISIDEQAYDEFKVSESITEKNLATGEADKTYDATGLQSLTVSGDVDISFTNTRIK
QKVRLQKVNVENDNNFLAGAVFDIYESDANGNKASHPMYSGLVTNDKGLLLVDANNYLSLPVGKYYLTETKAPPG
YLLPKNDISVLVISTGVTFEQNGNNATPIKENLVDGSTVYTFKITNSKGTELPSTGGIGTHIYILVGLALALPSG
LILYYRKKI

[0946] An E box containing a conserved glutamic residue has also been identified in 01524. The E box motif is underlined in SEQ ID NO: 36 below. The conserved glutamic acid (E), at amino acid residue 1344, is marked in bold. The E box motif, in particular the conserved glutamic acid residue, is thought to be important for the formation of oligomeric pilus-like structures of 01524. Preferred

[symbol]

box motif.

SEQ ID NO: 36
MLKKCQTFIIESLKKKXHPKEWKIIMWSLMILTTFLTTYFLILPAITVEETKTDDVGITLENKNSSQVTSSTSSS
QSSVEQSKPQTPASSVTETSSSEEAAYREEPLMFRGADYTVTVTLTKEAKIPKNADLKVTELKDNSATFKDYKKK
ALTEVAKQDSEIKNFKLYDITIESNGKEAEPQAPVKVEVNYDKPLEASDENLKVVHFKDDGQTEVLKSKDTAETK
NTSSDVAFKTDSFSIYAIVQEDNTEVPRLTYHFQNNDGTDYDFLTASGMQVHHQIIKDGESLGEVGIPTIKAGEH
FNGWYTYDPTTGKYGDPVKFGEPITVTETKEICVRPFMSKVATVTLYDDSAGKSILERYQVPLDSSGNGTADLSS
FKVSPPTSTLLFVGWSKTQNGAPLSESEIQALPVSSDISLYPVFKESYGVEFNTGDLSTGVTYIAPRRVLTGQPA
STIKPNDPTRPGYTFAGWYTAASGGAAFDFNQVLTKDTTLYAHWSPAQTTYTINYWQQSATDNKNATDAQKTYEY
AGQVTRSGLSLSNQTLTQQDINDKLPTGFKVNNTRTETSVMIKDDGSSVVNVYYDRKLITIKFAKYGGYSLPEYY
YSYNWSSDADTYTGLYGTTLAANGYQWKTGAWGYLANVGNNQVGTYGHSYLGEFILPNDTVDSDVIKLFPKGNIV
QTYRFFKQGLDGTYSLADTGGGAGADEFTFTEKYLGFNVKYYQRLYPDNYLFDQYASQTSAGVKVPISDEYYDRY
GAYHKDYLNLVVWYERNSYKIKYLDPLDNTELPNFPVKDVLYEQNLSSYAPDTTTVQPKPSRPGYVWDGKWYKDQ
AQTQVFDFNTTMPPHDVKVYAGWQKVTYRVNIDPNGGRLSKTDDTYLDLHYGDRIPDYTDITRDYIQDPSGTYYY
KYDSRDKDPDSTKDAYYTTDTSLSNVDTTTKYKYVKDAYKLVGWYYVNPDGSIRPYNFSGAVTQDINLRAIWRKA
GDYHIIYSNDAVGTDGKPALDASGQQLQTSNEPTDPDSYDDGSHSALLRRPTMPDGYRFRGWWYNGKIYNPYDSI
DIDAHLADANKNITIKPVIIPVGDIKLEDTSIKYNGNGGTRVENGNVVTQVETPRMELNSTTTIPENQYFTRTGY
NLIGWHHDKDLADTGRVEFTAGQSIGIDNNPDATNTLYAVWQPKEYTVRVSKTVVGLDEDKTKDFLFNPSETLQQ
ENFPLRDGQTKEFKVPYGTSISIDEQAYDEFKVSESITEKNLATGEADKTYDATGLQSLTVSGDVDISFTNTRIK
QKVRLQKVNVENDNNFLAGAVFDIYESDANGNKASHPMYSGLVTNDKGLLLVDANNYLSLPVGKYYLTETKAPPG
YLLPKNDISVLVISTGVTFEQNGNNATPIKENLVDGSTVYTFKITNSKGTELPSTGGIGTHIYILVGLALALPSG
LILYYRKKI

01525

[0947] An example of an amino acid sequence for 01525 is set forth below. SEQ ID NO: 37 represents a 01525 sequence from GBS serotype III, strain isolate COH1.

SEQ ID NO: 37
MKRQISSDKLSQELDRVTYQKRFWSVIKNTIYILMAVASIAILIAVLWLPVLRIYGHSMNKTLSAGDVVFTVKGS
NFKTGDVVAFYYNNKVLVKRVIAESGDWVNIDSQGDVYVNQHKLKEPYVIHKALGNSNIKYPYQVPDKKIFVLGD
NRKTSIDSRSTSVGDVSEEQIVGKISFRIWPLGKISSIN

### GBS 322

[0948] GBS 322 refers to a surface immunogenic protein, also referred to as “sip”. Nucleotide and amino acid sequences of GBS 322 sequenced from serotype V isolated strain 2603 V/R are set forth in Ref. 3 as SEQ ID 8539 and SEQ ID 8540. These sequences are set forth below as SEQ ID NOS 38 and 39:

SEQ ID NO. 38
ATGAATAAAAAGGTACTATTGACATCGACAATGGCAGCTTCGCTATTATCAGTCGCAAGTGTTCAAGCACAAGAA
ACAGATACGACGTGGACAGCACGTACTGTTTCAGAGGTAAAGGCTGATTTGGTAAAGCAAGACAATAAATCATCA
TATACTGTGAAATATGGTGATACACTAAGCGTTATTTCAGAAGCAATGTCAATTGATATGAATGTCTTAGCAAAA
ATAAATAACATTGCAGATATCAATCTTATTTATCCTGAGACAACACTGACAGTAACTTACGATCAGAAGAGTCAT
ACTGCCACTTCAATGAAAATAGAAACACCAGCAACAAATGCTGCTGGTCAAACAACAGCTACTGTGGATTTGAAA
ACCAATCAAGTTTCTGTTGCAGACCAAAAAGTTTCTCTCAATACAATTTCGGAAGGTATGACACCAGAAGCAGCA
ACAACGATTGTTTCGCCAATGAAGACATATTCTTCTGCGCCAGCTTTGAAATCAAAAGAAGTATTAGCACAAGAG
CAAGCTGTTAGTCAAGCAGCAGCTAATGAACAGGTATCACCAGCTCCTGTGAAGTCGATTACTTCAGAAGTTCCA
GCAGCTAAAGAGGAAGTTAAACCAACTCAGACGTCAGTCAGTCAGTCAACAACAGTATCACCAGCTTCTGTTGCC
GCTGAAACACCAGCTCCAGTAGCTAAAGTAGCACCGGTAAGAACTGTAGCAGCCCCTAGAGTGGCAAGTGTTAAA
GTAGTCACTCCTAAAGTAGAAACTGGTGCATCACCAGAGCATGTATCAGCTCCAGCAGTTCCTGTGACTACGACT
TCACCAGCTACAGACAGTAAGTTACAAGCGACTGAAGTTAAGAGCGTTCCGGTAGCACAAAAAGCTCCAACAGCA
ACACCGGTAGCACAACCAGCTTCAACAACAAATGCAGTAGCTGCACATCCTGAAAATGCAGGGCTCCAACCTCAT
GTTGCAGCTTATAAAGAAAAAGTAGCGTCAACTTATGGAGTTAATGAATTCAGTACATACCGTGCGGGAGATCCA
GGTGATCATGGTAAAGGTTTAGCAGTTGACTTTATTGTAGGTACTAATCAAGCACTTGGTAATAAAGTTGCACAG
TACTCTACACAAAATATGGCAGCAAATAACATTTCATATGTTATCTGGCAACAAAAGTTTTACTCAAATACAAAC
AGTATTTATGGACCTGCTAATACTTGGAATGCAATGCCAGATCGTGGTGGCGTTACTGCCAACCACTATGACCAC
GTTCACGTATCATTTAACAAATAATATAAAAAAGGAAGCTATTTGGCTTCTTTTTTATATGCCTTGAATAGACTT
TCAAGGTTCTTATATAATTTTTATTA
SEQ ID NO. 39
MNKKVLLTSTMAASLLSVASVQAQETDTTWTARTVSEVKADLVKQDNKSSYTVKYGDTLSVISEAMSIDMNVLAK
INNIADINLIYPETTLTVTYDQKSHTATSMKIETPATNAAGQTTATVDLKTNQVSVADQKVSLNTISEGMTPEAA
TTIVSPMKTYSSAPALKSKEVLAQEQAVSQAAANEQVSPAPVKSITSEVPAAKEEVKPTQTSVSQSTTVSPASVA
AETPAPVAKVAPVRTVAAPRVASVKVVTPKVETGASPERVSAPAVPVTTTSPATDSKLQATEVKSVPVAQKAPTA
TPVAQPASTTNAVAAHPENAGLQPHVAAYKEKVASTYGVNEFSTYRAGDPGDHGKGLAVDFIVGTNQALGNKVAQ
YSTQNMAANNISYVIWQQKFYSWTNSIYGPANTWNAMPDRGGVTANHYDHVHVSFNK

[0949] GBS 322 contains an N-terminal leader or signal sequence region which is indicated by the underlined sequence near the beginning of SEQ ID NO: 39. In one embodiment, one or more amino acids from the leader or signal sequence region of GBS 322 are removed. An example of such a GBS 322 fragment is set forth below as SEQ ID NO: 40.

SEQ ID NO: 40

DLVKQDNKSSYTVKYGDTLSVISEAMSIDMNVLAKINNIADINLIYPETT
LTVTYDQKSHTATSMKIETPATNAAGQTTATVDLKTNQVSVADQKVSLNT
ISEGMTPEAATTIVSPMKTYSSAPALKSKEVLAQEQAVSQAAANEQVSPA
PVKSITSEVPAAKEEVKPTQTSVSQSTTVSPASVAAETPAPVAKVAPVRT
VAAPRVASVKVVTPKVETGASPEHVSAPAVPVTTTSPATDSKLQATEVKS
VPVAQKAPTATPVAQPASTTNAVAAHPENAGLQPHVAAYKEKVASTYGNN
EFSTYRAGDPGDHGKGLAVDFIVGTNQALGNKVAQYSTQNMAANNISYVI
WQQKFYSNTNSIYGPANTWNAMPDRGGVTANHYDHVHVSFNK

[0950] Additional preferred fragments of GBS 322 comprise the immunogenic epitopes identified in WO 03/068813, each of which are specifically incorporated by reference herein.

[0951] There may be an upper limit to the number of GBS proteins which will be in the compositions of the invention. Preferably, the number of GBS proteins in a composition of the invention is less than 20, less than 19, less than 18, less than 17, less than 16, less than 15, less than 14, less than 13, less than 12, less than 11, less than 10, less than 9, less than 8, less than 7, less than 6, less than 5, less than 4, or less than 3. Still more preferably, the number of GBS proteins in a composition of the invention is less than 6, less than 5, or less than 4. Still more preferably, the number of GBS proteins in a composition of the invention is 3.

[0952] The GBS proteins and polynucleotides used in the invention are preferably isolated, i.e., separate and discrete, from the whole organism with which the molecule is found in nature or, when the polynucleotide or polypeptide is not found in nature, is sufficiently free of other biological macromolecules so that the polynucleotide or polypeptide can be used for its intended purpose.

### Group A Streptococcus Adhesin Island Sequences

[0953] The GAS AI polypeptides of the invention can, of course, be prepared by various means (e.g. recombinant expression, purification from GAS, chemical synthesis etc.) and in various forms (e.g. native, fusions, glycosylated, non-glycosylated etc.). They are preferably prepared in substantially pure form (i.e. substantially free from other streptococcal or host cell proteins) or substantially isolated form.

[0954] The GAS AI proteins of the invention may include polypeptide sequences having sequence identity to the identified GAS proteins. The degree of sequence identity may vary depending on the amino acid sequence (a) in question, but is preferably greater than 50% (e.g. 60%, 65%, 70%, 75%,

[symbol]

having sequence identity include homologs, orthologs, allelic variants and functional mutants of the identified GBS proteins. Typically, 50% identity or more between two proteins is considered to be an indication of functional equivalence. Identity between proteins is preferably determined by the Smith-Waterman homology search algorithm as implemented in the MPSRCH program (Oxford Molecular), using an affinity gap search with parameters gap open penalty=12 and gap extension penalty=1.

[0955] The GAS adhesin island polynucleotide sequences may include polynucleotide sequences having sequence identity to the identified GAS adhesin island polynucleotide sequences. The degree of sequence identity may vary depending on the polynucleotide sequence in question, but is preferably greater than 50% (e.g. 60%, 65%, 70%, 75%, 80%, 85%, 90%, 91%, 92%, 93%, 94%, 95%, 96%, 97%, 98%, 99%, 99.5% or more).

[0956] The GAS adhesin island polynucleotide sequences of the invention may include polynucleotide fragments of the identified adhesin island sequences. The length of the fragment may vary depending on the polynucleotide sequence of the specific adhesin island sequence, but the fragment is preferably at least 10 consecutive polynucleotides, (e.g. at least 10, 12, 14, 16, 18, 20, 25, 30, 35, 40, 50, 60, 70, 80, 90, 100, 150, 200 or more).

[0957] The GAS adhesin island amino acid sequences of the invention may include polypeptide fragments of the identified GAS proteins. The length of the fragment may vary depending on the amino acid sequence of the specific GAS antigen, but the fragment is preferably at least 7 consecutive amino acids, (e.g. 8, 10, 12, 14, 16, 18, 20, 25, 30, 35, 40, 50, 60, 70, 80, 90, 100, 150, 200 or more). Preferably the fragment comprises one or more epitopes from the sequence. Other preferred fragments include (1) the N-terminal signal peptides of each identified GAS protein, (2) the identified GAS protein without their N-terminal signal peptides, and (3) each identified GAS protein wherein up to 10 amino acid residues (e.g. 1, 2, 3, 4, 5, 6, 7, 8, 9, 10, 15, 20, 25 or more) are deleted from the N-terminus and/or the C-terminus e.g. the N-terminal amino acid residue may be deleted. Other fragments omit one or more domains of the protein (e.g. omission of a signal peptide, of a cytoplasmic domain, of a transmembrane domain, or of an extracellular domain).

[0958] GAS AI-1 Sequences

[0959] As discussed above, a GAS AI-1 sequence is present in an M6 strain isolate (MGAS10394). Examples of GAS AI-1 sequences from M6 strain isolate MGAS10394 are set forth below.

[0960] M6_Spy0156: Spy0156 is a rofA transcriptional regulator. An example of an amino acid sequence for M6_Spy0156 is set forth in SEQ ID NO: 41.

SEQ ID NO: 41

MIEKYLESSIESKCQLVVLFFKTSYLPITEVAEKTGLTFLQLNHYCEELN
AFFPDSLSMTIQKRMISCQFTHPFKETYLYQLYASSNVLQLLAFLIKNGS
HSRPLTDFARSHFLSNSSAYRMREALIPLLRNFELKLSKNKIVGEEYRIR
YLIALLYSKFGIKVYDLTQQDKNTIHSFLSHSSTHLKTSPWLSESFSFYD
ILLALSWKRHQFSVTIPQTRIFQQLKKLFIYDSLKKSSRDIIETYCQLNF
SAGDLDYLYLIYITANNSFASLQWTPEHIRQCCQLFEENDTFRLLLKPII
TLLPNLKEQKPSLVKALMFFSKSFLFNLQHFIPETNLFVSPYYKGNQKLY
TSLKLIVEEWLAKLPGKRYLVHKHFHLFCHYVEQILRNIQPPLVVVFVAS
NFINAHLLTDSFPRYFSDKSIDFHSYIAR

[0961] M6_Spy0157: M6_{—}0157 is a fibronectin binding protein. It contains a sortase subtrate motif LPXTG (SEQ ID NO: 122), shown in italics in the amino acid sequence SEQ ID NO: 42.

SEQ ID NO: 42

MVSSYMFVRGEKMNNKIFLNKEASFLAHTKRKRRFAVTLVGVFFMLLACA
GAIGFGQVAYAADEKTVPSHSSPNPEFPWYGYDAYGKEYPGYNIWTRYHD
LRVNLNGSRSYQVYCFNIQSNYPSQKNSFIKNWFKKIEGNGKSFVDYAHT
TKLGKEELEQRLLSLLYNAYPNDANGYMKGLEHLNAITVTQYAVWHYSDN
SQYQFETLWESEAKEGKISRSQVTLMREALKKLIDPNLEATAVNKIPSGY
RLNIFESENEAYQNLLSAEYVPDDPPKPGETSEHNPKTPELDGTPIPEDP
KHPDDNLEPTLPPVMLDGEEVPEVPSESLEPALPPLMPELDGQEVPEKPS
IDLPIEVPRYEFNNKDQSPLAGESGETEYITEVYGNQQNPVDIDKKLPNE
TGFSGNMVETEDTKEPEVLMGGQSESVEFTKDTQTGMSGQTTPQVETEDT
KEPEVLMGGQSESVEFTKDTQTGMSGQTTPQIETEDTKEPEVLMGGQSES
VEFTKDTQTGMSGQTTPQIETEDTKEPEVLMGGQSESVEFTKDTQTGMSG
FSETATVVEDTRPKLVFHFDNNEPKVEENREKPTKNITPILPATGDIENV
LAFLGILILSVLSIFSLLKNKQSNKKV.

[0962] M6_Spy0157 contains an amino acid motif indicative of a cell wall anchor: SEQ ID NO: 180 LPATG (shown in italics in SEQ ID NO: 42, above). In some recombinant host cell systems, it may be preferable to remove this motif to facilitate secretion of a recombinant M6_Spy0157 protein from the host cell. Alternatively, in other recombinant host cell systems, it may be preferable to use the cell wall anchor motif to anchor the recombinantly expressed protein to the cell wall. The extracellular domain of the expressed protein may be cleaved during purification or the recombinant protein may be left attached to either inactivated host cells or cell membranes in the final composition.

[0963] A pilin motif, discussed above, containing a conserved lysine (K) residue has also been identified in M6_Spy0157. The pilin motif sequence is underlined in SEQ ID NO: 42, below. Conserved lysine (K) residues are also marked in bold, at amino acid residues 277, 287, and 301. The pilin sequence, in particular the conserved lysine residues, are thought to be important for the formation of oligomeric, pilus-like structures. Preferred fragments of M6_Spy0157 include at least one conserved lysine residue. Preferably, fragments include the pilin sequence.

SEQ ID NO: 42

MVSSYMFVRGEKMNNKIFLNKEASFLAHTKRKRRFAVTLVGVFFMLLACA
GAIGFGQVAYAADEKTVPSHSSPNPEFPWYGYDAYGKEYPGYNIWTRYHD
LRVNLNGSRSYQVYCFNIQSNYPSQKNSFIKNWFKKIEGNGKSFVDYAHT
TKLGKEELEQRLLSLLYNAYPNDANGYMKGLEHLNAITVTQYAVWHYSDN
SQYQFETLWESEAKEGKISRSQVTLMREALKKLIDPNLEATAVNKIPSGY
RLNIFESENEAYQNLLSAEYVPDDPPKPGETSEHNPKTPELDGTPIPEDP
KHPDDNLEPTLPPVMLDGEEVPEVPSESLEPALPPLMPELDGQEVPEKPS
IDLPIEVPRYEFNNKDQSPLAGESGETEYITEVYGNQQNPVDIDKKLPNE
TGFSGNMVETEDTKEPEVLMGGQSESVEFTKDTQTGMSGQTTPQVETEDT
KEPEVLMGGQSESVEFTKDTQTGMSGQTTPQIETEDTKEPEVLMGGQSES
VEFTKDTQTGMSGQTTPQIETEDTKEPEVLMGGQSESVEFTKDTQTGMSG
FSETATVVEDTRPKLVFHFDNNEPKVEENREKPTKNITPILPATGDIENV
LAFLGILILSVLSIFSLLKNKQSNKKV

[0964] A repeated series of four E boxes containing a conserved glutamic residue have been identified in M6_Spy0157. The E-box motifs are underlined in SEQ ID NO: 42, below. The conserved glutamic acid (E) residues, at amino acid residues 415, 452, 489, and 526 are marked in bold. The E box motif, in particular the conserved glutamic acid residue, is thought to be important for the formation of oligomeric pilus-like structures of M6_Spy0157. Preferred fragments of M6_Spy0157 include at least one conserved glutamic acid residue. Preferably, fragments include at least one E box motif.

SEQ ID NO: 42

MVSSYMFVRGEKMNNKIFLNKEASFLAHTKRKRRFAVTLVGVFFMLLACA
GAIGFGQVAYAADEKTVPSHSSPNPEFPWYGYDAYGKEYPGYNIWTRYHD
LRVNLNGSRSYQVYCFNIQSNYPSQKNSFIKNWFKKIEGNGKSFVDYAHT
TLKGKEELEQRLLSLLYNAYPNDANGYMKGLEHLNAITVTQYAVWHYSDN
SQYQFETLWESEAKEGKISRSQVTLNREALRKLIDPNLEARTAVNKIPSG
YRLNIFESENEAYQNLLSAEYVPDDPPKPGETSEHNPKTPELDGTPIPED
PKHPDDNLEPTLPPVMLDGEEVPEVPSESLEPALPPLMPELDGQEVPEKP
SIDLPIEVPRYEFNNKDQSPLAGESGETEYITEVYGNQQNPVDIDKKLPN
ETGFSGNMVETEDTKEPEVLMGGQSESVEFTKDTQTGHSGQTTPQVETEDT
KEPEVLMGGQSESVEFTKDTQTGMSGQTTPQIETEDTKEPEVLMGGQSES
VEFTKDTQTGMSGQTTPQIETEDTKEPEVLMGGQSESVEFTKDTQTGMSG
FSETATVVEDTRPKLVFHFDNNEPKVEENREKPTKNITPILPATGDIENV
LAFLGILILSVLSIFSLLKNKQSNKKV

[0965] M6_Spy0158: M6 Spy0158 is a reverse transcriptase. An example of Spy0158 is shown in the amino acid sequence SEQ ID NO 43.

### SEQ ID NO: 43

### MSLRHQNKKGIRKEGWKSRPQSRSDHCQLVAQKSVLKQAISKTVLAERGLFSCLDDYLERHALKVN

[0966] M6_Spy0159: M6_Spy0159 is a collagen adhesion protein. It contains a sortase substrate motif LPXSG, shown in italics in the amino acid sequence SEQ ID NO: 44.

SEQ ID NO: 44

MYSRLKRELVIVINRKKKYKLIRLMVTVGLIFSQLVLPIRRLGLQMISTQ
TKVIPQEIVTQTETQGTQVVATKQKLESENSSLKVALKRESGFEHNATID
ASLDTESQGDNSQRSVTQAIVTMALELRKQGLSIVDTKIVRIQSSTNQRN
DITTTLTFKNGLSLEGASTEANDPNVRVGIVNPNDTVQTITPTIKQDADG
KVKNLVFTGRLGKQVIIVSTTRLKEEQTISLDSYGELVIDGAVGLSQKDR
PPYSKPITVNILKPKLSSIESSLDSKDFEIVKTIDNLYTWDDQFYLLDFI
SKQYEVLKTDYQSAKDSTPQTRDILFGEYTVEPLVMNKGHNNTINIYIRS
TRPLGLKPIGAAPALIQPRSFRSLTPRSTRMKRSAPVEKFEGELEHHKRI
DYLGDNQNNPDTTIDDKEDEHDTSDLYRLYLDMTGKKNPLDILVVVDKSG
SMQEGIGSVQRYRYYAQRWDDYYSQWVYHGTFDYSSYQGESFNRGQIHYR
YRGIVSVSDGIRRDDAVKNSLLGVNGLLQRFVNINPENKLSVIGFQGSAD
YHAGKWYFDQSPRGGFYQPNLNNSRDAELLKGWSTNSLLDPNTLTALHNN
GTNYHAALLKAKEILNEVKDDGRRKIMIFISDGVPTFYFGEDGYRSGNGS
SNDRNNVTRSQEGSKLAIDEFKARYPNLSIYSLGVSKDINSDTASSSPVV
LKYLSGEEHYYGITDTAELEKTLNKIVEDSKLSQLGISDSLSQYVDYYDK
QPDVLVTRKSKVNDETEILYQKDQVQEAGKDIIDKVVFTPKTTSQPKGKV
TLTFKSDYKVDDEYTYTLSFNVKASDEAYEKYKDWEGRYSEMGDSDTDYG
TNQTSSGKGGLPSNSDASVNYMADGREQKLPYKHPVIQVKTVPITFTKVD
ADNNQKKLAGVEFELRKEDKKIVWEKGTTGSNGQLNFKYLQKGKTYYLYE
TKAKLGYTLPENPWEVAVANNGDIKVKHPIEGELKSKDGSYMIKNYKIYQ
LPSSGGRGSQIFIIVGSMTATVALLFYRRQHRKKQY

[0967] M6_Spy0159 contains an amino acid motif indicative of a cell wall anchor: SEQ ID NO: 181 LPSSG (shown in italics in SEQ ID NO: 44, above). In some recombinant host cell systems, it may be preferable to remove this motif to facilitate secretion of a recombinant M6_Spy0159 protein from the host cell. Alternatively, in other recombinant host cell systems, it may be preferable to use the cell wall anchor motif to anchor the recombinantly expressed protein to the cell wall. The extracellular domain of the expressed protein may be cleaved during purification or the recombinant protein may be left attached to either inactivated host cells or cell membranes in the final composition.

[0968] A pilin motif, discussed above, containing a conserved lysine (K) residue has also been identified in M6_Spy0159. The pilin motif sequence is underlined in SEQ ID NO: 44, below. Conserved lysine (K) residues are also marked in bold, at amino acid residues 265 and 276. The pilin sequence, in particular the conserved lysine residues, are thought to be important for the formation of oligomeric, pilus-like structures. Preferred fragments of M6_Spy0159 include at least one conserved lysine residue. Preferably, fragments include the pilin sequence.

SEQ ID NO: 44

MYSRLKRELVIVINRKKKYKLIRLMVTVGLIFSQLVLPIRRLGLQMISTQ
TKVIPQEIVTQTETQGTQVVATKQKLESENSSLKVALKRESGFEHNATID
ASLDTESQGDNSQRSVTQAIVTMALELRKQGLSIVDTKIVRIQSSTNQRN
DITTTLTFKNGLSLEGASTEANDPNVRVGIVNPNDTVQTITPTIKQDADG
KVKNLVFTGRLGKQVIIVSTTRLKEEQTISLDSYGELVIDGAVGLSQKDR
PPYSKPITVNILKPKLSSIESSLDSKDFEIVKTIDNLYTWDDQFYLLDFI
SKQYEVLKTDYQSAKDSTPQTRDILFGEYTVEPLVMNKGHNNTINIYIRS
TRPLGLKPIGAAPALIQPRSFRSLTPRSTRMKRSAPVEKFEGELEHHKRI
DYLGDNQNNPDTTIDDKEDEHDTSDLYRLYLDMTGKKNPLDILVVVDKSG
SMQEGIGSVQRYRYYAQRWDDYYSQWVYHGTFDYSSYQGESFNRGQIHYR
YRGIVSVSDGIRRDDAVKNSLLGVNGLLQRFVNINPENKLSVIGFQGSAD
YHAGKWYFDQSPRGGFYQPNLNNSRDAELLKGWSTNSLLDPNTLTALHNN
GTNYHAALLKAKEILNEVKDDGRRKIMIFISDGVPTFYFGEDGYRSGNGS
SNDRNNVTRSQEGSKLAIDEFKARYPNLSIYSLGVSKDINSDTASSSPVV
LKYLSGEEHYYGITDTAELEKTLNKIVEDSKLSQLGISDSLSQYVDYYDK
QPDVLVTRKSKVNDETEILYQKDQVQEAGKDIIDKVVFTPKTTSQPKGKV
TLTFKSDYKVDDEYTYTLSFNVKASDEAYEKYKDWEGRYSEMGDSDTDYG
TNQTSSGKGGLPSNSDASVNYMADGREQKLPYKHPVIQVKTVPITFTKVD
ADNNQKKLAGVEFELRKEDKKIVWEKGTTGSNGQLNFKYLQKGKTYYLYE
TKAKLGYTLPENPWEVAVANNGDIKVKHPIEGELKSKDGSYMIKNYKIYQ
LPSSGGRGSQIFIIVGSMTATVALLFYRRQHRKKQY

[0969] An E box containing a conserved glutamic residue has been identified in M6_Spy0159. The E-box motif is underlined in SEQ ID NO: 44, below. The conserved glutamic acid (E), at amino acid residue 950, is marked in bold. The E box motif, in particular the conserved glutamic acid residue, is thought to be important for the formation of oligomeric pilus-like structures of M6_Spy0159. Preferred fragments of M6_Spy0159 include the conserved glutamic acid residue. Preferably, fragments include the E box motif.

SEQ ID NO: 44

MYSRLKRELVIVINRKKKYKLIRLMVTVGLIFSQLVLPIRRLGLQMISTQ
TKVIPQEIVTQTETQGTQVVATKQKLESENSSLKVALKRESGFEHNATID
ASLDTESQGDNSQRSVTQAIVTMALELRKQGLSIVDTKIVRIQSSTNQRN
DITTTLTFKNGLSLEGASTEANDPNVRVGIVNPNDTVQTITPTIKQDADG
KVKNLVFTGRLGKQVIIVSTTRLKEEQTISLDSYGELVIDGAVGLSQKDR
PPYSKPITVNILKPKLSSIESSLDSKDFEIVKTIDNLYTWDDQFYLLDFI
SKQYEILKTDYQSAKDSTPQTRDILFGEYTVEPLVMNKGHNNTINIYIRS
TRPLGLKPIGAAPALIQPRSFRSLTPRSTRMKRSAPVEKFEGELEHHKRI
DYLGDNQNNPDTTIDDKEDEHDTSDLYRLYLDMTGKKNPLDILVVVDKSG
SMQEGIGSVQRYRYYAQRWDDYYSQWVYHGTFDYSSYQGESFNRGQIHYR
YRGIVSVSDGIRRDDAVKNSLLGVNGLLQRFVNINPENKLSVIGFQGSAD
YHAGKWYPDQSPRGGFYQPNLNNSRDAELLKGWSTNSLLDPNTLTALHNN
GTNYHAALLKAKEILNEVKDDGRRKIMIFISDGVPTFYFGEDGYRSGNGS
SNDRNNVTRSQEGSKLAIDEFRARYPNLSIYSLGVSKDINSDTASSSPVV
LKYLSGEEHYYGITDTAELEKTLNKIVEDSKLSQLGISDSLSQYVDYYDK
QPDVLVTRKSKVNDETEILYQKDQVQEAGKDIIDKVVFTPKTTSQPKGKV
TLTFKSDYKVDDEYTYTLSFNVKASDEAYEKYKDNEGRYSEMGDSDTDYG
TNQTSSGKGGLPSNSDASVNYMADGREQKLPYKHPVIQVKTVPITFTKVD
ADNNQKKLAGVEFELRKEDKKIVWEKGTTGSNGQLNFKYLOKGKTYYLYE
TKAKLGYTLPENEWEVAVANNGDIKVKHPIEGELKSKDGSYMIKNYKIYQ
LPSSGGRGSQIFIIVGSMTATVALLFYRRQHRKKQY

[0970] M6_Spy0160: M6_Spy0160 is a fimbrial structural subunit. It contains a sortase substrate motif LPXTG (SEQ ID NO: 122), shown in italics in amino acid sequence SEQ ID NO: 45.

SEQ ID NO: 45

MTNRRETVREKILITAKKLMLACLAILAVVGLGMTRVSALSKDDTAQLKI
TNIEGGPTVTLYKIGEGVYNTNGDSFINFKYAEGVSLTETGPTSQEITTI
ANGINTGKIKPFSTENVSISNGTATYNARGASVYIALLTGATDGRTYNPI
LLAASYNGEGNLVTKNIDSKSNYLYGQTSVAKSSLPSITKKVTGTIDDVN
KKTTSLGSVLSYSLTFELPSYTKEAVNKTVYVSDNMSEGLTFNFNSLTVE
WKGKMANITEDGSVMVENTKIGIAKEVNNGFNLSFIYDSLESISPNISYK
AVVNNKAIVGEEGNPNKAEFFYSNNPTKGNTYDNLDKKPDKGNGITSKED
SKIVYTYQIAFRKVDSVSKTPLIGAIFGVYDTSNKLIDIVTTNKNGYAIS
TQVSSGKYKIKELKAPKGYSLNTETYEITANWVTATVKTSANSKSTTYTS
DKNKATDNSEQVGWLKNGIFYSIDSRPTGNDVKEAYIESTKALTDGTTFS
KSNEGSGTVLLETDIPNTKLGELPSTGSIGTYLFKAIGSAAMIGAIGIYI
VKRRKA

[0971] M6_Spy0160 contains an amino acid motif indicative of a cell wall anchor: SEQ ID NO: 131 LPSTG (shown in italics in SEQ ID NO: 45, above). In some recombinant host cell systems, it may be preferable to remove this motif to facilitate secretion of a recombinant M6_Spy0160 protein from the host cell. Alternatively, in other recombinant host cell systems, it may be preferable to use the cell wall anchor motif to anchor the recombinantly expressed protein to the cell wall. The extracellular domain of the expressed protein may be cleaved during purification or the recombinant protein may be left attached to either inactivated host cells or cell membranes in the final composition.

[symbol]

E-box motif is underlined in SEQ ID NO: 45, below. The conserved glutamic acid (E), at amino acid residue 412, is marked in bold. The E box motif, in particular the conserved glutamic acid residue, is thought to be important for the formation of oligomeric pilus-like structures of M6_Spy0160. Preferred fragments of M6_Spy0160 include the conserved glutamic acid residue. Preferably, fragments include the E box motif.

SEQ ID NO: 45

MTNRRETVREKILITAKKLMLACLAILAVVGLGMTRVSALSKDDTAQLKI
TNIEGGPTVTLYKIGEGVYNTNGDSFINFKYAEGVSLTETGPTSQEITTI
ANGINTGKIKPFSTENVSISNGTATYNARGASVYIALLTGATDGRTYNPI
LLAASYNGEGNLVTKNIDSKSNYLYGQTSVAKSSLPSITKKVTGTIDDVN
KKTTSLGSVLSYSLTFELPSYTKEAVNKTVYVSDNNSEGLTFNFNSLTVE
WKGKMANITEDGSVMVENTKIGIAKEVNNGFNLSFIYDSLESISPNISYK
AVVNNKAIVGEEGNPNKAEFFYSNNPTKGNTYDNLDKKPDKGNGITSKED
SKIVYTYQIAFRKVDSVSKTPLIGAIFGVYDTSNKLIDIVTTNKNGYAIS
TQVSSGKYKIKELKAPKGYSLNTETYEITANWVTATVKTSANSKSTTYTS
DKNKATDNSEQVGWLKNGIFYSIDSRPTGNDVKEAYIESTKALTDGTTFS
KSNEGSGTVLLETDIPNTKLGELPSTGSIGTYLFKAIGSAAMIGAIGIYI
VKRRKA

[0972] M6_Spy0161 is a srtB type sortase. An example of an amino acid sequence of M6_Spy-161 is shown in SEQ ID NO: 46.

SEQ ID NO: 46

MTERLKNLGILLLFLLGTAIFLYPTLSSQWNAYRDRQLLSTYHKQVIQKK
PSEMEEVWQKAKAYNARLGIQPVPDAFSFRDGIHDKNYESLLQIENNDIM
GYVEVPSIKVTLPIYHYTTDEVLTKGAGHLFGSALPVGGDGTHTVISAHR
GLPSAEMFTNLNLVKKGDTFYFRVLNKVLAYKVDQILIVEPDQATSLSGV
MGKDYATLVTCTPYGVNTKRLLVRGHRIAYHYKKYQQAKKAMKLVDKSRM
WAEVVCAAFGVVIAIILVFMYSRVSAKKSK

[0973] As discussed above, applicants have also determined the nucleotide and encoded amino acid sequence of fimbrial structural subunits in several other GAS AI-1 strains of bacteria. Examples of sequences of these fimbrial structural subunits are set forth below.

[0974] M6 strain isolate CDC SS 410 is a GAS AI-1 strain of bacteria. CDC SS 410_fimbrial is thought to be a fimbrial structural subunit of M6 strain isolate CDC SS 410. An example of a nucleotide sequence encoding the CDC SS 410_fimbrial protein (SEQ ID NO: 267) and a CDC SS 410_fimbrial protein amino acid sequence (SEQ ID NO: 268) are set forth below.

SEQ ID NO: 267

aaagatgatactgcacaactaaagataacaaatattgaaggtgggccaac
agtaacactttataaaataggagaaggtgtttacaacactaatggtgatt
cttttattaactttaaatatgctgagggggtttctttaactgaaacagga
cctacatcacaagaaattactactattgcaaatggtattaatacgggtaa
aataaagccttttagtactgaaaacgttagtatttctaatggaacagcaa
cttataatgcgagaggtgcatctgtttatattgcattattaacaggtgcg
acagatggccgtacctacaatcctattttattagctgcatcttataatgg
tgagggaaatttagttactaaaaatattgattccaaatctaattatttat
atggacaaacaagtgttgcaaaatcatcattaccatctattacaaagaaa
gtaaccgggacaatagatgacgtgaataaaaagactacctcgttaggaag
tgtattgtcttattcgctgacatttgaattaccaagttataccaaagaag
cagtcaataaaacagtatatgtttctgataatatgtcggaaggtcttact
tttaactttaatagtcttacagtagaatggaaaggtaagatggctaatat
tactgaagatggttcagtaatggtagaaaatacaaaaatcggaatagcta
aggaggttaataacggttttaatttaagttttatttatgatagtttagaa
tctatatcaccaaatataagttataaagctgttgtaaacaataaagctat
tgttggtgaagagggtaatcctaataaagctgaattcttctattcaaata
atccaacaaaaggtaatacatacgataatttagataagaagcctgataaa
gggaatggtattacatccaaagaagattctaaaattgtttatacttatca
aatagcgtttagaaaagttgatagtgttagtaagaccccacttattggtg
caatttttggagtttatgatactagtaataaattaattgatattgttaca
accaataaaaatggatatgctatttcaacacaagtatcttcaggaaaata
taaaattaaggaattaaaagctcctaaaggttattcattgaatacagaaa
cttatgaaattacggcaaattgggtaactgctacagtcaagacaagtgct
aattcaaaaagtactacttatacatctgataaaaataaggcgacagataa
ttcagagcaagtaggatggttaaaaaatggtatattctattctatagata
gtagacctacaggaaatgatgttaaagaggcttatattgaatctactaag
gctttaactgatggaacaactttctcaaaatcgaatgaaggttcaggtac
agtattattagaaactgacatccctaacaccaagctaggtgaactc

SEQ ID NO: 268

KDDTAQLKITNIEGGPTVTLYKIGEGVYNTNGDSFINFKYAEGVSLTETG
PTSQEITTIANGINTGKIKPFSTENVSISNGTATYNARGASVYIALLTGA
TDGRTYNPILLAASYNGEGNLVTKNIDSKSNYLYGQTSVAKSSLPSITKK
VTGTIDDVNKKTTSLGSVLSYSLTFELPSYTKEAVNKTVYVSDNMSEGLT
FNFNSLTVEWKGKMANITEDGSVMVENTKIGIAKEVNNGFNLSFIYDSLE
SISPNISYKAVVNNKAIVGEEGNPNKAEFFYSNNPTKGNTYDNLDKKPDK
GNGITSKEDSKIVYTYQIAFRKVDSVSKTPLIGAIFGVYDTSNKLIDIVT
TNKNGYAISTQVSSGKYKIKELKAPKGYSLNTETYEITANWVTATVKTSA
NSKSTTYTSDKNKATDNSEQVGWLKNGIFYSIDSRPTGNDVKEAYIESTK
ALTDGTTFSKSNEGSGTVLLETDIPNTKLGEL.

[0975] M6 strain isolate ISS 3650 is a GAS AI-1 strain of bacteria. ISS3650_fimbrial is thought to be a fimbrial structural subunit of M6 strain isolate ISS 3650. An example of a nucleotide sequence encoding the ISS3650_fimbrial protein (SEQ ID NO: 269) and an ISS3650_fimbrial protein amino acid sequence (SEQ ID NO: 270) are set forth below.

SEQ ID NO: 269

gaatggaaaggtaagatggctaatattactgaagatggttcagtaatggt
agaaaatacaaaaatcggaatagctaaggaggttaataacggttttaatt
taagttttatttatgatagtttagaatctatatcaccaaatataagttat
aaagctgttgtaaacaataaagctattgttggtgaagagggtaatcctaa
taaagctgaattcttctattcaaataatccaacaaaaggtaatacatacg
ataatttagataagaagcctgataaagggaatggtattacatccaaagaa
gattctaaaattgtttatacttatcaaatagcgtttagaaaagttgatag
tgttagtaagaccccacttattggtgcaatttttggagtttatgatacta
gtaataaattaattgatattgttacaaccaataaaaatggatatgctatt
tcaacacaagtatcttcaggaaaatataaaattaaggaattaaaagctcc
taaaggttattcattgaatacagaaacttatgaaattacggcaaattggg
taactgctacagtcaagacaagtgctaattcaaaaagtactacttataca
tctgataaaaataaggcgacagataattcagagcaagtaggatggttaaa
aaatggtatattctattctatagatagtagacctacaggaaatgatgtta
aagaggcttatattgaatctactaaggctttaactgatggaacaactttc
tcaaaatcgaatgaaggttcaggtacagtattattagaaactgacatcc

SEQ ID NO: 270

EWKGKMANITEDGSVMVENTKIGIAKEVNNGFNLSFIYDSLESISPNISY
KAVVNNKAIVGEEGNPNKAEFFYSNNPTKGNTYDNLDKKPDKGNGITSKE
DSKIVYTYQIAFRKVDSVSKTPLIGAIFGVYDTSNKLIDIVTTNKNGYAI
STQVSSGKYKIKELAPKGYSLNTETYEITANWVTATVKTSANSKSTTYTS
DKNKATDNSEQVGWLKNGIFYSIDSRPTGNDVKEAYIESTKALTDGTTFS
KSNEGSGTVLLETDI

[0976] M23 strain isolate DSM2071 is a GAS AI-1 strain of bacteria. DSM2071_fimbrial is thought to be a fimbrial structural subunit of M23 strain DSM2071. An example of a nucleotide sequence encoding the DSM2071_fimbrial protein (SEQ ID NO: 251) and a DSM2071_fimbrial protein amino acid sequence (SEQ ID NO: 252) are set forth below.

SEQ ID NO: 251

atgagagagaaaatattaatagcagcaaaaaaactaatgctagcttgttt
agctatcttagctgtagtagggcttggaatgacaagagtatcagctttat
caaaagatgataaggcggagttgaagataacaaatatcgaaggtaaaccg
accgtgacactgtataaaattggtgatggaaaatacagtgagcgagggga
ttcttttattggatttgagttaaagcaaggtgtggagctaaataaggcaa
aacctacatctcaagaaataaataaaatcgctaatggtattaataaaggt
agtgttaaggctgaagtagttaatataaaagaacatgctagtacaactta
tagttatacaacaactggtgcaggtattacttggctatattgactggagc
tactgatggacgtgcctataatcctatcttactgacagcttcttacaatg
aggaaaatccacttaagggagggcagattgacgcaactagtcattatctt
tttggagaagaagcagttgctaaatctagccaaccaacaattagcaagtc
aattacaaaatccacaaaagatggtgataaagatacagcatctgtaggtg
aaaaagttgattacaaattaactgttcagttaccaagttattcgaaagat
gctatcaataaaacggtgtttatcactgacaaattgtctcagggacttac
tttccttccaaaaagtttaaagattatctggaatggtcaaacgttaacaa
aggtgaatgaagaatttaaagctggagataaggtaattgctcaacttaag
gttgaaaataatggatttaatctgaactttaattatgataaccttgataa
tcatgccccagaagttaactatagtgctctactaaatgaaaacgcagttg
ttggtaaaggtggtaatgacaataatgtagactattactattcaaataat
ccgaataaaggagagacccataaaacaactgagaagcctaaagagggtga
aggtactggtatcactaaaaagacggataaaaaaaccgtctacacctatc
gtgtagcctttaagaaaacaggcaaagatcatgccccactagctggtgct
gttttcggtatctattcagataaggaagcgaaacaattagtcgatattgt
tgtgacaaatgcacagggttatgcagcatcaagcgaagttgggaaaggga
cttattacattaaagaaattaaatcccctaagggttactctttaaataca
aatatttatgaagtggaaacttcatgggaaaaagctacaacgacttctac
aactaatcgtttagagacaatttatacaacagatgataatcaaaagtctc
caggaactaatacagttggttggttggaagatggtgtcttttacaaagaa
aatccaggtggtgatgctaaacttgcctatatcaaacaatcaacagagga
gacttctacaactatagaagtcaaagaaaatcaagctgaaggttcaggta
cggtattattagaaactgaaattcctaacaccaaattaggtgaattacct
tcgacaggtagcattggtacttacctctttaaagctattggttcggctgc
tatgatcggtgcaattggtatttatattgttaaacgtcgtaaagcttaa

SEQ ID NO: 252

MREKILIAAKKLMLACLAILAVVGLGMTRVSALSKDDKAELKITNIEGKP
TVTLYKIGDGKYSERGDSFIGFELKQGVELNKAKPTSQEINKIANGINKG
SVKAEVVNIKEHASTTYSYTTTGAGIYLAILTGATDGRAYNPILLTASYN
EENPLKGGQIDATSHYLFGEEAVAKSSQPTISKSITKSTKDGDKDTASVG
EKVDYKLTVQLPSYSKDAINKTVFITDKLSQGLTFLPKSLKIIWNGQTLT
KVNEEFKAGDKVIAQLKVENNGFNLNFNYDNLDNHAPEVNYSALLNENAV
VGKGGNDNNVDYYYSNNPNKGETHKTTEKPKEGEGTGITKKTDKKTVYTY
RVAFKKTGKDHAPLAGAVFGIYSDKEAKQLVDIVVTNAQGYAASSEVGKG
TYYIKEIKSPKGYSLNTNIYEVETSWEKATTTSTTNRLETIYTTDDNQKS
PGTNTVGWLEDGVFYKENPGGDAKLAYIKQSTEETSTTIEVKENQAEGSG
TVLLETEIPNTKLGELPSTGSIGTYLFKAIGSAIQdIGAIGIYIVKRRKA

[0977] GAS AI-2 Sequences

[0978] As discussed above, a GAS AI-2 sequence is present in an M1 strain isolate (SF370). Examples of GAS AI-2 sequences from M1 strain isolate SF370 are set forth below.

[0979] Spy0124 is a rofA transcriptional regulator. An example of an amino acid sequence for Spy0124 is set forth in SEQ ID NO:47.

SEQ ID NO: 47

MIEKYLESSIESKCQLIVLFFKTSYLPITEVAEKTGLTFLQLNHYCEELN
AFFPGSLSMTIQKRMISCQFTHPFKETYLYQLYASSNVLQLLAFLIKNGS
HSRPLTDFARSHFLSNSSAYRMREALIPLLRNFELKLSKNKIVGEEYRIR
YLIALLYSKFGIKVYDLTQQDKNTIHSFLSHSSTHLKTSPWLSESFSFYD
ILLALSWKRHQFSVTIPQTRIFQQLKKLFVYDSLKKSSHDIIETYCQLNF
SAGDLDYLYLIYITANNSFASLQWTPEHIRQYCQLFEENDTFRLLLNPII
TLLPNLKEQKASLVKALMFFSKSFLFNLQHFIPETNLFVSPYYKGNQKLY
TSLKLIVEEWMAKLPGKRDLNHKHFHLFCHYVEQSLRNIQPPLVVVFVAS
NFINAHLLTDSFPRYFSDKSIDFHSYYLLQDNVYQIPDLKPDLVITHSQL
IPFVHHELTKGIAVAEISFDESILSIQELMYQVKEEKFQADLTKQLT

[0980] GAS 015 is also referred to as Cpa. It contains a sortase substrate motif VVXTG (SEQ ID NO: 135), shown in italics in SEQ ID NO: 48.

SEQ ID NO: 48
LRGEKMKKTRFPNKLNTLNTQRVLSKNSKRFTVTLVGVFLMIFALVTSMVGAKTVFGLVESSTPNAINPDSSSEY
RWYGYESYVRGHPYYKQFRVAHDLRVNLEGSRSYQVYCFNLKKAFPLGSDSSVKKWYKKHDGISTKFEDYAMSPR
ITGDELNQKLRAVMYNGHPQNANGIMEGLEPLNAIRVTQEAVWYYSDNAPISNPDESFKRESESNLVSTSQLSLM
RQALKQLIDPNLATKMPKQVPDDFQLSIFESEDKGDKYNKGYQNLLSGGLVPTKPPTPGDPPMPPNQPQTTSVLI
RKYAIGDYSKLLEGATLQLTGDNVNSFQARVFSSNDIGERIELSDGTYTLTELNSPAGYSIAEPITFKVEAGKVY
TIIDGKQIENPNKEIVEPYSVEAYNDEEEFSVLTTQNYAKFYYAKNKNGSSQVVYCFNADLKSPPDSEDGGKTMT
PDFTTGEVKYTHIAGRDLFKYTVKPRDTDPDTFLKHIKKVIEKGYREKGQAIEYSGLTETQLRAATQLAIYYFTD
SAELDKDKLKDYHGFGDMNDSTLAVAKILVEYAQDSNPPQLTDLDFFIPNNNKYQSLIGTQWHPEDLVDIIRMED
KKEVIPVTHNLTLRKTVTGLAGDRTKDFHFEIELKNNKQELLSQTVKTDKTNLEFKDGKATINLKHGESLTLQGL
PEGYSYLVKETDSEGYKVKVNSQEVANATVSKTGITSDETLAFENNKEPVVPTGVDQKINGYLALIVIAGISLGI
WGIHTIRIRKHD

[0981] GAS 015 contains an amino acid motif indicative of a cell wall anchor: SEQ ID NO: 182 VVPTG (shown in italics in SEQ ID NO: 48, above). In some recombinant host cell systems, it may be preferable to remove this motif to facilitate secretion of a recombinant GAS 015 protein from the host cell. Alternatively, in other recombinant host cell systems, it may be preferable to use the cell wall anchor motif to anchor the recombinantly expressed protein to the cell wall. The extracellular domain of the expressed protein may be cleaved during purification or the recombinant protein may be left attached to either inactivated host cells or cell membranes in the final composition.

[0982] A pilin motif, discussed above, containing a conserved lysine (K) residue has also been identified in GAS 015. The pilin motif sequence is underlined in SEQ ID NO: 48, below. Conserved lysine (K) residues are also marked in bold, at amino acid residue 243. The pilin sequence, in particular the conserved lysine residues, are thought to be important for the formation of oligomeric, pilus-like structures. Preferred fragments of GAS 015 include the conserved lysine residue. Preferably, fragments include the pilin sequence.

SEQ ID NO: 48
LRGEKMKKTRFPNKLNTLNTQRVLSKNSKRFTVTLVGVFLMIFALVTSMVGAKTVFGLVESSTPNAINPDSSSEY
RWYGYESYVRGHPYYKQFRVAHDLRVNLEGSRSYQVYCFNLKKAFPLGSDSSVKKWYKKHDGISTKFEDYAMSPR
ITGDELNQKLRAVMYNGHPQNANGIMEGLEPLNAIRVTQEAVWYYSDNAPISNPDESFKRESESNLVSTSQLSLM
RQALKQLIDPNLATKMPKQVPDDFQLSIFESEDKGDKYNKGYQNLLSGGLVPTKPPTPGDPPMPPNQPQTTSVLI
RKYAIGDYSKLLEGATLQLTGDNVNSFQARVFSSNDIGERIELSDGTYTLTELNSPAGYSIAEPITFKVEAGKVY
TIIDGKQIENPNKEIVEPYSVEAYNDFEEFSVLTTQNYAKFYYAKNKNGSSQVVYCFNADLKSPPDSEDGGKTMT
PDFTTGEVKYTHIAGRDLFKYTVKPRDTDPDTFLKHIKKVIEKGYREKGQAIEYSGLTETQLRAATQLAIYYFTD
SAELDKDKLKDYHGFGDMNDSTLAVAKILVEYAQDSNPPQLTDLDFFIPNNNKYQSLIGTQWHPEDLVDIIRMED
KKEVIPVTHNLTLRKTVTGLAGDRTKDFHFEIELKNNKQELLSQTVKTDKTNLEFKDGKATINLKHGESLTLQGL
PEGYSYLVKETDSEGYKVKVNSQEVANATVSKTGITSDETLAFENNKEPVVPTGVDQKINGYLALIVIAGISLGI
WGIHTIRIRKHD

[0983] An E box containing a conserved glutamic residue has been identified in GAS 015. The E-box motif is underlined in SEQ ID NO: 48, below. The conserved glutamic acid (E), at amino acid residue 352, is marked in bold. The E box motif, in particular the conserved glutamic acid residue, is thought to be important for the formation of oligomeric pilus-like structures of GAS 015. Preferred fragments of GAS 015 include the conserved glutamic acid residue. Preferably, fragments include the E box motif.

SEQ ID NO: 48
LRGEKMKKTRFPNKLNTLNTQRVLSKNSKRFTVTLVGVFLMIFALVTSMVGAKTVFGLVESSTPNAINPDSSSEY
RWYGYESYVRGHPYYKQFRVAHDLRVNLEGSRSYQVYCFNLKKAFPLGSDSSVKKWYKKHDGISTKFEDYAMSPR
ITGDELNQKLRAVMYNGHPQNANGIMEGLEPLNAIRVTQEAVWYYSDNAPISNPDESFKRESESNLVSTSQLSLM
RQALKQLIDPNLATKMPKQVPDDFQLSIFESEDKGDKYNKGYQNLLSGGLVPTKPPTPGDPPMPPNQPQTTSVLI
RKYAIGDYSKLLEGATLQLTGDNVNSFQARVFSSNDIGERIELSDGTYTLTELNSPAGYSIAEPITFKVEAGKVY
TIIDGKQIENPNKEIVEPYSVEAYNDFEEFSVLTTQNYAKFYYAKNKNGSSQVVYCFNADLKSPPDSEDGGKTMT
PDFTTGEVKYTHIAGRDLFKYTVKPRDTDPDTFLKHIKKVIEKGYREKGQAIEYSGLTETQLRAATQLAIYYFTD
SAELDKDKLKDYHGFGDMNDSTLAVAKILVEYAQDSNPPQLTDLDFFIPNNNKYQSLIGTQWHPEDLVDIIRMED
KKEVIPVTHNLTLRKTVTGLAGDRTKDFHFEIELKNNKQELLSQTVKTDKTNLEFKDGKATINLKHGESLTLQGL
PEGYSYLVKETDSEGYKVKVNSQEVANATVSKTGITSDETLAFENNKEPVVPTGVDQKINGYLALIVIAGISLGI
WGIHTIRIRKHD

[0984] Spy0127 is a LepA putative signal peptidase. An example of an amino acid sequence for Spy0127 is set forth in SEQ ID NO: 49.

SEQ ID NO: 49
MIIKRNDMAPSVKAGDAILFYRLSQTYKVEEAVVYEDSKTSITKVGRIIAQAGDEVDLTEQGELKINGHIQNEGL
TFIKSREANYPYRIADNSYLILNDYYSQESENYLQDAIAKDAIKGTINTLIRLRNH

[0985] Spy0128 is thought to be a fibrial protein. It contains a sortase substrate motif EVXTG (SEQ ID NO: 136) shown in italics in SEQ ID NO: 50.

SEQ ID NO: 50
MKLRHLLLTGAALTSFAATTVHGETVVNGAKLTVTKNLDLVNSNALIPNTDFTFKIEPDTTVNEDGNKFKGVALN
TPMTKVTYTNSDKGGSNTKTAEFDFSEVTFEKPGVYYYKVTEEKIDKVPGVSYDTTSYTVQVHVLWNEEQQKPVA
TYIVGYKEGSKVPIQFKNSLDSTTLTVKKKVSGTGGDRSKDFNFGLTLKANQYYKASEKVMIEKTTKGGQAPVQT
EASIDQLYHFTLKDGESIKVTNLPVGVDYVVTEDDYKSEKYTTNVEVSPQDGAVKNIAGNSTEQETSTDKDMTIT
FTNKKDFEVPTGVAMTVAPYIALGIVAVGGALYFVKKKNA

[0986] Spy0128 contains an amino acid motif indicative of a cell wall anchor: SEQ ID NO: 183 EVPTG (shown in italics in SEQ ID NO: 50, above). In some recombinant host cell systems, it may be preferable to remove this motif to facilitate secretion of a recombinant Spy0128 protein from the host cell. Alternatively, in other recombinant host cell systems, it may be preferable to use the cell wall anchor motif to anchor the recombinantly expressed protein to the cell wall. The extracellular domain of the expressed protein may be cleaved during purification or the recombinant protein may be left attached to either inactivated host cells or cell membranes in the final composition.

[0987] Two E boxes containing a conserved glutamic residue have been identified in Spy0128. The E-box motifs are underlined in SEQ ID NO: 50, below. The conserved glutamic acid (E) residues, at amino acid residues 271 and 290, are marked in bold. The E box motifs, in particular the conserved glutamic acid residues, are thought to be important for the formation of oligomeric pilus-like structures of Spy0128. Preferred fragments of Spy0128 include at least one conserved glutamic acid residue. Preferably, fragments include at least one E box motif.

SEQ ID NO: 50
MKLRHLLLTGAALTSFAATTVHGETVVNGAKLTVTKNLDLVNSNALIPNTDFTFKIEPDTTVNEDGNKFKGVALN
TPMTKVTYTNSDKGGSNTKTAEFDFSEVTFEKPGVYYYKVTEEKIDKVPGVSYDTTSYTVQVHVLWNEEQQKPVA
TYIVGYKEGSKVPIQFKNSLDSTTLTVKKKVSGTGGDRSKDFNFGLTLKANQYYKASEKVMIEKTTKGGQAPVQT
EASIDQLYHFTLKDGESIKVTNLPVGVDYVVTEDDYKSEKYTTNVEVSPQDGAVKNIAGNSTEQETSTDKDMTIT
FTNKKDFEVPTGVAMTVAPYIALGIVAVGGALYFVKKKNA

[0988] Spy0129 is a srtC1 type sortase. An example of an amino acid sequence for Spy0129 is set forth in SEQ ID NO: 51.

SEQ ID NO: 51
MIVRLIKLLDKLINVIVLCFFFLCLLIAALGIYDALTVYQGANATNYQQYKKKGVQFDDLLAINSDVMAWLTVKG
THIDYPIVQGENNLEYINKSVEGEYSLSGSVFLDYRNKVTFEDKYSLIYAHHMAGNVMFGELPNFRKKSFFNKHK
EFSIETKTKQKLKINIFACIQTDAFDSLLFNPIDVDISSKNEFLNHIKQKSVQYREILTTNESRFVALSTCEDMT
TDGRIIVIGQIE″

[0989] Spy0130 is referred to as a hypothetical protein. It contains a sortase substrate motif LPXTG (SEQ ID NO: 122), shown in italics in SEQ ID NO: 52.

SEQ ID NO: 52
MKKSILRILAIGYLLMSFCLLDSVEAENLTASINIEVINQVDVATNKQSSDIDETFMFVIEALDKESPLPNSVTT
SVKGNGKTSFEQLTFSEVGQYHYKIHQLLGKNSQYHYDETVYEVVIYVLYNEQSGALETNLVSNKLGETEKSELI
FKQEYSEKTPEPHQPDTTEKEKPQKKRNGILPSTGEMVSYVSALGIVLVATITLYSIYKKLKTSK

[0990] Spy0130 contains an amino acid motif indicative of a cell wall anchor: SEQ ED NO: 131 LPSTG (shown in italics in SEQ ID NO: 52, above). In some recombinant host cell systems, it may be preferable to remove this motif to facilitate secretion of a recombinant Spy0130 protein from the host cell. Alternatively, in other recombinant host cell systems, it may be preferable to use the cell wall anchor motif to anchor the recombinantly expressed protein to the cell wall. The extracellular domain of the expressed protein may be cleaved during purification or the recombinant protein may be left attached to either inactivated host cells or cell membranes in the final composition.

[0991] Two E boxes containing conserved glutamic residues have been identified in Spy0130. The E-box motifs are underlined in SEQ ID NO: 52, below. The conserved glutamic acid (E) residues, at amino acid residues 118 and 148, are marked in bold. The E box motifs, in particular the conserved glutamic acid residues, are thought to be important for the formation of oligomeric pilus-like structures of Spy0130. Preferred fragments of Spy0130 include at least one conserved glutamic acid residue. Preferably, fragments include at least one E box motif.

SEQ ID NO: 52
MKKSILRILAIGYLLMSFCLLDSVEAENLTASINIEVINQVDVATNKQSSDIDETFMFVIEALDKESPLPNSVTT
SVKGNGKTSFEQLTFSEVGQYHYKIHQLLGKNSQYHYDETVYEVVIYVLYNEQSGALETNLVSNKLGETEKSELI
FKQEYSEKTPEPHQPDTTEKEKPQKKRNGILPSTGEMVSYVSALGIVLVATITLYSIYKKLKTSK

[0992] Spy0131 is referred to as a conserved hypothetical protein. An example of an amino acid sequence of Spy0131 is set forth in SEQ ID NO: 53

SEQ ID NO: 53
MTRTNYQKKRMTCPVETEDITYRRKKIKGRRQAILAQFEPELVHHELIGDSCTCPDCHGTLTEIGSVVQRQELVF
IPAQLKRINHVQHAYKCQTCSDNSLSDKIIKAPVPKAPLAHSLGSASIIAHTVHQKFTLKVPNYRQEEDWNKLGL
SISRKEIANWHIKSSQYYFEPLYDLLRDILLSQEVIHADETSYRVLESDTQLTYYWTFLSGKHEKKGITLYHHDK
RRSGLVTQEVLGDYSGYVHCDMHGAYRQLEHAKLVGCWAHVRRKFFEATPKQADKTSLGRKGLVYCDKLFALEAE
WCELPPQERLVKRKEILTPLMTTFFDWCREQVVLSGSKLGLAIAYSLKHERTFRTVLEDGHIVLSNNMAERAIKS
LVMGRKNWLFSQSFEGAKAAAIIMSLLETAKRHGLNSEKYISYLLDRLPNEETLAKREVLEAYLPWAKKVQTNCQ

[0993] Spy0133 is referred to as a conserved hypothetical protein. An example of an amino acid sequence of Spy0133 is set forth in SEQ ID NO: 54.

SEQ ID NO: 54
MTIRLNDLGQVYLVCGKTDMRQGIDSLAYLVKSQHELDLFSGAVYLFCGGRRDRFKALYWDGQGFWLLYKRFENG
KLAWPRNRDEVKCLTAVQVDWLMKGFFISPNIKISKSHDFY

[0994] Spy0135 is a SrtB type sortase. It is also referred to as a putative fibria-associated protein. An example of an amino acid sequence of Spy0135 is set forth in SEQ ID NO: 55.

SEQ ID NO: 55
MECYRDRQLLSTYHKQVTQKKPSEMEEVWQKAKAYNARLGIQPVPDAFSFRDGIHDKNYESLLQIENNDIMGYVE
VPSIKVTLPIYHYTTDEVLTKGAGHLFGSALPVGGDGTHTVISAHRGLPSAEMFTNLNLVKKGDTFYFRVLNKVL
AYKVDQILTVEPDQVTSLSGVMGKDYATLVTCTPYGVNTKRLLVRGHRIAYHYKKYQQAKKAMKLVDKSRMWAEV
VCAAFGVVIAIILVFMYSRVSAKKSK

[0995] GAS AI-3 Sequences

[symbol]

Examples of GAS AI-3 sequences from M3 strain isolate MGAS315 are set forth below.

[0996] SpyM30097 is as a negative transcriptional regulator (Nra). An example of an amino acid sequence of SpyM30097 is set forth in SEQ ID NO: 56.

SEQ ID NO: 56
MPYVKKKKDSFLVETYLEQSIRDKSELVLLLFKSPTIIFSHVAKQTGLTAVQLKYYCKELDDFFGNNLDITIKKG
KIICCFVKPVKEFYLHQLYDTSTILKLLVFFIKNGTSSQPLIKFSKKYFLSSSSAYRLRESLIKLLREFGLRVSK
NTIVGEEYRIRYLIAMLYSKFGIVIYPLDHLDNQIIYRFLSQSATNLRTSPWLEEPFSFYNMLLALSWKRHQFAV
SIPQTRIFRQLKKLFIYDCLTRSSRQVIENAFSLTFSQGDLEYLFLIYITTNNSFASLQWTPQHIETCCHIFEKN
DTFRLLLEPILKRLPQLNHSKQDLIKALMYFSKSFLFNLQHFVIEIPSFSLPTYTGNSNLYKALKNIVNQWLAQL
PGKRHLNEKHLQLFCSHIEQILKNKQPALTVVLISSNFINAKLLTDTIPRYFSDKGIHFYSFYLLRDDIYQIPSL
KPDLVITHSRLIPFVKNDLVKGVTVAEFSFDNPDYSIASIQNLIYQLKDKKYQDFLNEQLQ

[0997] SpyM30098 is thought to be a collagen binding protein (Cpb). It contains a sortase substrate motif VPXTG (SEQ ID NO: 137) shown in italics in SEQ ID NO: 57.

SEQ ID NO: 57
MQKRDKTNYGSANNKRRQTTIGLLKVFLTFVALIGIVGFSIRAFGAEEQSVPNKQSSVQDYPWYGYDSYSKGYPD
YSPLKTYHNLKVNLDGSKEYQAYCFNLTKHFPSKSDSVRSQWYKKLEGTNENFIKLADKPRIEDGQLQQNILRIL
YNGYPNDRNGIMKGIDPLNAILVTQNAIWYYTDSSYISDTSKAFQQEETDLKLDSQQLQLMRNALKRLINPKEVE
SLPNQVPANYQLSIFQSSDKTFQNLLSAEYVPDTPPKPGEEPPAKTEKTSVIIRKYAEGDYSKLLEGATLKLAQI
EGSGFQEKIFDSNKSGEKVELPNGTYVLSELKPPQGYGVATPITFKVAAEKVLIKNKEGQFVENQNKEIAEPYSV
TAFNDFEEIGYLSDFNNYGKFYYAKNTNGTNQVVYCFNADLHSPPDSYDHGANIDPDVSESKEIKYTHVSGYDLY
KYAATPRDKDADFFLKHIKKILDKGYKKKGDTYKTLTEAQFRAATQLAIYYYTDSADLTTLKTYNDNKGYHGFDK
LDDATLAVVHELITYAEDVTLPMTQNLDFFVPNSSRYQALIGTQYHPNELIDVISMEDKQAPIIPITHKLTISKT
VTGTIADKKKEFNFEIHLKSSDGQAISGTYPTNSGELTVTDGKATFTLKDGESLIVEGLPSGYSYEITETGASDY
EVSVNGKNAPDGKATKASVKEDETVAFENRKDLVPPTGLTTDGAIYLWLLLLVPFGLLVWLFGRKGTKK

[0998] SpyM30098 contains an amino acid motif indicative of a cell wall anchor: SEQ ID NO: 184 VPPTG (shown in italics in SEQ ID NO: 57, above). In some recombinant host cell systems, it may be preferable to remove this motif to facilitate secretion of a recombinant SpyM30098 protein from the host cell. Alternatively, in other recombinant host cell systems, it may be preferable to use the cell wall anchor motif to anchor the recombinantly expressed protein to the cell wall. The extracellular domain of the expressed protein may be cleaved during purification or the recombinant protein may be left attached to either inactivated host cells or cell membranes in the final composition.

[0999] A pilin motif, discussed above, containing a conserved lysine (K) residue has also been identified in SpyM30098. The pilin motif sequence is underlined in SEQ ID NO: 57, below. Conserved lysine (K) residues are also marked in bold, at amino acid residues 262 and 270. The pilin sequence, in particular the conserved lysine residues, are thought to be important for the formation of oligomeric, pilus-like structures. Preferred fragments of SpyM30098 include at least one conserved lysine residue. Preferably, fragments include the pilin sequence.

SEQ ID NO: 57
MQKRDKTNYGSANNKRRQTTIGLLKVFLTFVALIGIVGFSIRAFGAEEQSVPNKQSSVQDYPWYGYDSYSKGYPD
YSPLKTYHNLKVNLDGSKEYQAYCFNLTKHFPSKSDSVRSQWYKKLEGTNENFIKLADKPRIEDGQLQQNILRIL
YNGYPNDRNGIMKGIDPLNAILVTQNAIWYYTDSSYISDTSKAFQQEETDLKLDSQQLQLMRNALKRLINPKEVE
SLPNQVPANYQLSIFQSSDKTFQNLLSAEYVPDTPPKPGEEPPAKTEKTSVIIRKYAEGDYSKLLEGATLKLAQI
EGSGFQEKIFDSNKSGEKVELPNGTYVLSELKPPQGYGVATPITFKVAAEKVLIKNKEGQFVENQNKEIAEPYSV
TAFNDFEEIGYLSDFNNYGKFYYAKNTNGTNQVVYCFNADLHSPPDSYDHGANIDPDVSESKEIKYTHVSGYDLY
KYAATPRDKDADFFLKHIKKILDKGYKKKGDTYKTLTEAQFRAATQLAIYYYTDSADLTTLKTYNDNKGYHGFDK
LDDATLAVVHELITYAEDVTLPMTQNLDFFVPNSSRYQALIGTQYHPNELIDVISMEDKQAPIIPITHKLTISKT
VTGTIADKKKEFNFEIHLKSSDGQAISGTYPTNSGELTVTDGKATFTLKDGESLIVEGLPSGYSYEITETGASDY
EVSVNGKNAPDGKATKASVKEDETVAFENRKDLVPPTGLTTDGAIYLWLLLLVPFGLLVWLFGRKGTKK

[1000] An E bos containing a conserved glutamic residue has been identified in SpyM30098. The E-box motif is underlined in SEQ ID NO: 57, below. The conserved glutamic acid (E), at amino acid residue 330, is marked in bold. The E box motif, in particular the conserved glutamic acid residue, is thought to be important for the formation of oligomeric pilus-like structures of SpyM30098. Preferred fragments of SpyM30098 include the conserved glutamic acid residue. Preferably, fragments include the E box motif.

SEQ ID NO: 57
MQKRDKTNYGSANNKRRQTTIGLLKVFLTFVALIGIVGFSIRAFGAEEQSVPNKQSSVQDYPWYGYDSYSKGYPD
YSPLKTYHNLKVNLDGSKEYQAYCFNLTKHFPSKSDSVRSQWYKKLEGTNENFIKLADKPRIEDGQLQQNILRIL
YNGYPNDRNGIMKGIDPLNAILVTQNAIWYYTDSSYISDTSKAFQQEETDLKLDSQQLQLMRNALKRLINPKEVE
SLPNQVPANYQLSIFQSSDKTFQNLLSAEYVPDTPPKPGEEPPAKTEKTSVIIRKYAEGDYSKLLEGATLKLAQI
EGSGFQEKIFDSNKSGEKVELPNGTYVLSELKPPQGYGVATPITFKVAAEKVLIKNKEGQFVENQNKEIAEPYSV
TAFNDFEEIGYLSDFNNYGKFYYAKNTNGTNQVVYCFNADLHSPPDSYDHGANIDPDVSESKEIKYTHVSGYDLY
KYAATPRDKDADFFLKHIKKILDKGYKKKGDTYKTLTEAQFRAATQLAIYYYTDSADLTTLKTYNDNKGYHGFDK
LDDATLAVVHELITYAEDVTLPMTQNLDFFVPNSSRYQALIGTQYHPNELIDVISMEDKQAPIIPITHKLTISKT
VTGTIADKKKEFNFEIHLKSSDGQAISGTYPTNSGELTVTDGKATFTLKDGESLIVEGLPSGYSYEITETGASDY
EVSVNGKNAPDGKATKASVKEDETVAFENRKDLVPPTGLTTDGAIYLWLLLLVPFGLLVWLFGRKGTKK

[1001] SpyM30099 is referred to as LepA. An example of an amino acid sequence of SpyM30099 is set forth in SEQ ID NO: 58.

SEQ ID NO: 58
MTNYLNRLNENPLLKAFIRLVLKISIIGFLGYILFQYVFGVMIVNTNQMSPAVSAGDGVLYYRLTDRYHINDVVV
YEVDDTLKVGRIAAQAGDEVNFTQEGGLLINGHPPEKEVPYLTYPHSSGPNFPYKVPTGTYFILNDYREERLDSR
YYGALPINQIKGKISTLLRVRGI

[1002] SpyM30100 is thought to be a fimbrial protein. An example of an amino acid sequence of SpyM30100 is set forth in SEQ ID NO: 59.

SEQ ID NO: 59
MKKNKLLLATAILATALGTASLNQNVKAETAGVSENAKLIVKKTFDSYTDNEVLMPKADYTFKVEADSTASGKTK
DGLEIKPGIVNGLTEQIISYTNTDKPDSKVKSTEFDFSKVVFPGIGVYRYTVSEKQGDVEGITYDTKKWTVDVYV
GNKEGGGFEPKFIVSKEQGTDVKKPVNFNNSFATTSLKVKKNVSGNTGELQKEFDFTLTLNESTNFKKDQIVSLQ
KGNEKFEVKIGTPYKFKLKNGESIQLDKLPVGITYKVNEMEANKDGYKTTASLKEGDGQSKMYQLDMEQKTDESA
DEIVVTNKRDTQVPTGVVGTLAPFAVLSIVAIGGVIYITKRKKA

[1003] SpyM30100 contains an amino acid motif indicative of a cell wall anchor: SEQ ID NO: 140 QVPTG (shown in italics in SEQ ID NO: 59, above). In some recombinant host cell systems, it may be preferable to remove this motif to facilitate secretion of a recombinant SpyM30100 protein from the host cell. Alternatively, in other recombinant host cell systems, it may be preferable to use the cell wall anchor motif to anchor the recombinantly expressed protein to the cell wall. The extracellular domain of the expressed protein may be cleaved during purification or the recombinant protein may be left attached to either inactivated host cells or cell membranes in the final composition.

[1004] Two pilin motifs, discussed above, containing conserved lysine (K) residues have also been identified in SpyM30100. The pilin motif sequences are underlined in SEQ ID NO: 59, below. Conserved lysine (K) residues are also marked in bold, at amino acid residues 57 and 63 and at amino acid residues 161 and 166. The pilin sequences, in particular the conserved lysine residues, are

[symbol]

SpyM30100 include at least one conserved lysine residue. Preferably, fragments include at least one pilin sequence.

SEQ ID NO: 59
MKKNKLLLATAILATALGTASLNQNVKAETAGVSENAKLIVKKTFDSYTDNEVLMPKADYTFKVEADSTASGKTK
DGLEIKPGIVNGLTEQIISYTNTDKPDSKVKSTEFDFSKVVFPGIGVYRYTVSEKQGDVEGITYDTKKWTVDVYV
GNKEGGGFEPKFIVSKEQGTDVKKPVNFNNSFATTSLKVKKNVSGNTGELQKEFDFTLTLNESTNFKKDQIVSLQ
KGNEKFEVKIGTPYKFKLKNGESIQLDKLPVGITYKVNEMEANKDGYKTTASLKEGDGQSKMYQLDMEQKTDESA
DEIVVTNKRDTQVPTGVVGTLAPFAVLSIVAIGGVIYITKRKKA

[1005] Two E boxes, each containing a conserved glutamic residue, have been identified in SpyM30100. The E-box motifs are underlined in SEQ ID NO: 59, below. The conserved glutamic acid (E) residues, at amino acid residues 232 and 264, are marked in bold. The E box motifs, in particular the conserved glutamic acid residues, are thought to be important for the formation of oligomeric pilus-like structures of SpyM30100. Preferred fragments of SpyM30100 include at least one conserved glutamic acid residue. Preferably, fragments include at least one E box motif.

SEQ ID NO: 59
MKKNKLLLATAILATALGTASLNQNVKAETAGVSENAKLIVKKTFDSYTDNEVLMPKADYTFKVEADSTASGKTK
DGLEIKPGIVNGLTEQIISYTNTDKPDSKVKSTEFDFSKVVFPGIGVYRYTVSEKQGDVEGITYDTKKWTVDVYV
GNKEGGGFEPKFIVSKEQGTDVKKPVNENNSFATTSLKVKXNVSGNTGELQKEFDFTLTLNESTNFKKDQIVSLQ
KGNEKFEVKIGTPYKFKLKNGESIQLDKLPVGITYKVNEMEANKDGYKTTASLKEGDGQSKMYQLDMEQKTDESA
DEIVVTWKRDTQVPTGVVGTLAPFAVLSIVAIGGVIYITKRKKA

[1006] SpyM30101 is a SrtC2 type sortase. An example of an amino acid sequence of SpyM30101 is set forth in SEQ ID NO: 60.

SEQ ID NO: 60
MTIVQVINKAIDTLILIFCLVVLFLAGFGLWDSYHLYQQADASNFKKFKTAQQQPKFEDLLALNEDVIGWLNIPG
THIDYPLVQGKTNLEYINKAVDGSVAMSGSLFLDTRNHNDFTDDYSLIYGHHMAGNAMFGEIPKFLKKDFFSKHN
KAIIETKERKKLTVTIFACLKTDAFNQLVFNPNAITNQDQQRQLVDYISKRSKQFKPVKLKHHTKFVAFSTCENF
STDNRVIVVGTIQE

[1007] SpyM30102 is referred to as a hypothetical protein. An example of an amino acid sequence of SpyM30102 is set forth in SEQ ID NO: 61.

SEQ ID NO: 61
MILTMLAFNQTVLAKDSTVQTSISVENVLERAGDSTPFSIALESIDAMKTIEEITIAGSGKASFSPLTFTTVGQY
TYRVYQKPSQNKDYQADTTVFDVLVYVTYDEDGTLVAKVISRRAGDEEKSAITFKPKWLVKPIPPRQPNIPKTPL
PLAGEVKSLLGILSIVLLGLLVLLYVKKLKSRL

[1008] SpyM30102 contains an amino acid motif indicative of a cell wall anchor: SEQ ID NO: 185 LPLAG (shown in italics in SEQ ID NO: 61, above). In some recombinant host cell systems, it may be preferable to remove this motif to facilitate secretion of a recombinant SpyM30102 protein from the host cell. Alternatively, in other recombinant host cell systems, it may be preferable to use the cell wall anchor motif to anchor the recombinantly expressed protein to the cell wall. The extracellular domain of the expressed protein may be cleaved during purification or the recombinant protein may be left attached to either inactivated host cells or cell membranes in the final composition.

[1009] A pilin motif, discussed above, containing a conserved lysine (K) residue has also been identified in SpyM30102. The pilin motif sequence is underlined in SEQ ID NO: 61, below. The conserved lysine (K) residue is also marked in bold, at amino acid residue 132. The pilin sequence, in

[symbol]

pilus-like structures. Preferred fragments of SpyM30102 include the conserved lysine residue. Preferably, fragments include the pilin sequence.

SEQ ID NO: 61
MILTMLAFNQTVLAKDSTVQTSISVENVLERAGDSTPFSIALESIDAMKTIEEITIAGSGKASFSPLTFTTVGQY
TYRVYQKPSQNKDYQADTTVFDVLVYVTYDEDGTLVAKVISRRAGDEEKSAITFKPKWLVKPIPPRQPNIPKTPL
PLAGEVKSLLGILSIVLLGLLVLLYVKKLRSRL

[1010] Two E boxes containing conserved glutamic residues have been identified in SpyM30102. The E-box motifs are underlined in SEQ ID NO: 61, below. The conserved glutamic acid (E) residues, at amino acid residues 52 and 122, are marked in bold. The E box motifs, in particular the conserved glutamic acid residues, are thought to be important for the formation of oligomeric pilus-like structures of SpyM30102. Preferred fragments of SpyM30102 include at least one conserved lysine residue. Preferably, fragments include at least one pilin sequence.

SEQ ID NO: 61
MILTMLAFNQTVLAKDSTVQTSISVENVLERAGDSTPFSIALESIDAMKTIEEITIAGSGKASFSPLTFTTVGQY
TYRVYQKPSQNKDYQADTTVFDVLVYVTYDEDGTLVAKVISRRAGDEEKSAITFKPKWLVKPIPPRQPNIPKTPL
PLAGEVKSLLGILSIVLLGLLVLLYVKKLKSRL

[1011] SpyM30103 is referred to as a putative multiple sugar metabolism regulator. An example of an amino acid sequence for SpyM3103 is set forth in SEQ ID NO: 62.

SEQ ID NO: 62
MVRFDLKHVQTLHSLSQLPISVMSQDKALIQVYGNDDYLLCYYQFLKHLAIPQAAQDVIFYEGLFEESFMIFPLC
HYIIAIGPFYPYSLNKDYQEQLANNCLKHSSHRSKEELLSYMALVPHFPINNVRNLLIAIDAFFDTQFETTCQQT
IHQLLQHSKQMTADPDIIHRLKHISKASSQLPPVLEHLNHIMDLVKLGNPQLLKQEINRIPLSSITSSSISALRA
EKNLTVIYLTRLLEFSFVENTDVAKHYSLVKYYMALNEEASDLLKVLRIRCAAIIHFSESLTNKSISDKRQMYNS
VLHYVDSHLYSKLKVSDIAKRLYVSESHLRSVFKKYSNVSLQHYILSTKIKEAQLLLKRGIPVGEVAKSLYFYDT
THFHKIFKKYTGISSKDYLAKYRDNI

[1012] SpyM30104 is thought to be a F2 like fibronectic binding protein. An example of an amino acid sequence for SpyM30104 is set forth in SEQ ID NO: 63.

SEQ ID NO: 63
MSSSDEETLKQYASKYTSNRRGDTSGNLKKQIAKVLTEGYPTNKSDWLNGLTENEKIEVTQDAIWYFTETTVPAD
RSYTNRNVNSQKMKEVYQKLIDTTDIDKYEDVQFDLFVPQDTNLQAVISVEPVIESLPWTSLKPIAQKDITAKKI
WVDAPKEKPIIYFKLYRQLPGEKEVAVDDAELKQINSEGQQEISVTWTUQLVTDEKGMAYIYSVKEVDKNGELLE
PKDYIKKEDGLTVTNTYVKPTSGHYDIEVTFGNGHIDITEDTTPDIVSGENQMKQIEGEDSKPIDEVTENNLIEF
GKNTMPGEEDGTNSNKYEEVEDSRPVDTLSGLSSEQGQSGDMTIEEDSATHIKFSKRDIDGKELAGATNELRDSS
GKTISTWISDGQVKDFYLMPGKYTFVETAAPDGYEVATAITFTVNEQGQVTVNGKATKGDAHIVMVDAYKPTKGS
GQVIDIEEKLPDEQGHSGSTTEIEDSKSSDVIIGGQGEVVDTTEDTQSGMTGHSGSTTEIEDSKSSDVIIGGQGE
VVDTTEDTQSGMTGHSGSTTKIEDSKSSDVIVGGQGQIVETTEDTQTGMHGDSGRKTEVEDTKLVQSFHFDNKEP
ESNSEIPKKDKSKSNTSLPATGEKQHNKFFWMVTSCSLISSVFVISLKSKKRLSSC

[1013] SpyM30104 contains an amino acid motif indicative of a cell wall anchor: SEQ ID NO: 180 LPATG (shown in italics in SEQ ID NO: 63, above). In some recombinant host cell systems, it may be preferable to remove this motif to facilitate secretion of a recombinant SpyM30104 protein from the host cell. Alternatively, in other recombinant host cell systems, it may be preferable to use the cell wall anchor motif to anchor the recombinantly expressed protein to the cell wall. The extracellular domain of the expressed protein may be cleaved during purification or the recombinant protein may be left attached to either inactivated host cells or cell membranes in the final composition.

[symbol]

identified in SpyM30104. The pilin motif sequences are underlined in SEQ ID NO: 63, below. Conserved lysine (K) residues are also marked in bold, at amino acid residues 156 and 227. The pilin sequences, in particular the conserved lysine residues, are thought to be important for the formation of oligomeric, pilus-like structures. Preferred fragments of SpyM30104 include at least one conserved lysine residue. Preferably, fragments include at least one pilin sequence.

SEQ ID NO: 63
MSSSDEETLKQYASKYTSNRRGDTSGNLKKQIAKVLTEGYPTNKSDWLNGLTENEKIEVTQDAIWYFTETTVPAD
RSYTNRNVNSQKMKEVYQKLIDTTDIDKYEDVQFDLFVPQDTNLQAVISVEPVIESLPWTSLKPIAQKDITAKKI
WVDAPKEKPIIYFKLYRQLPGEKEVAVDDAELKQIHSEGQQEISVTWTNQLVTDEKGMAYIYSVKEVDKNGELLE
PKDYIKKEDGLTVTNTYVKPTSGHYDIEVTFGNGHIDITEDTTPDIVSGENQMKQIEGEDSKPIDEVTENNLIEF
GKNTMPGEEDGTNSNKYEEVEDSRPVDTLSGLSSEQGQSGDMTIEEDSATHIKFSKRDIDGKELAGATMELRDSS
GKTISTWISDGQVKDFYLMPGKYTFVETAAPDGYEVATAITFTVNEQGQVTVNGKATKGDAHIVMVDAYKPTKGS
GQVIDIEEKLPDEQGHSGSTTEIEDSKSSDVIIGGQGEVVDTTEDTQSGMTGHSGSTTEIEDSKSSDVIIGGQGE
VVDTTEDTQSGMTGHSGSTTKIEDSKSSDVIVGGQGQIVETTEDTQTGMHGDSGRKTEVEDTKLVQSFHFDNKEP
ESNSEIPKKDKSKSNTSLPATGEKQHNKFFWMVTSCSLISSVFVISLKSKKRLSSC

[1014] An E box containing a conserved glutamic residue has been identified in SpyM30104. The E-box motif is underlined in SEQ ID NO: 63, below. The conserved glutamic acid (E), at amino acid residue 402, is marked in bold. The E box motif, in particular the conserved glutamic acid residue, is thought to be important for the formation of oligomeric pilus-like structures of SpyM30104. Preferred fragments of SpyM30104 include the conserved glutamic acid residue. Preferably, fragments include the E box motif.

SEQ ID NO: 63
MSSSDEETLKQYASKYTSNRRGDTSGNLKKQIAKVLTEGYPTNKSDWLNGLTENEKIEVTQDAIWYFTETTVPAD
RSYTNRNVNSQRMKEVYQKLIDTTDIDKYEDVQFDLFVPQDTNLQAVISVEPVIESLPWTSLKPIAQKDITAKKI
WVDAPKEKPIIYFKLYRQLPGEKEVAVDDAELKQINSEGQQEISVTWTNQLVTDEKGMAYIYSVKEVDKNGELLE
PKDYIKKEDGLTVTNTYVKPTSGHYDIEVTFGNGHIDITEDTTPDIVSGENQMKQIEGEDSKPIDEVTENNLIEF
GKNTMPGEEDGTNSNKYEEVEDSRPVDTLSGLSSEQGQSGDMTIEEDSATHIKFSKRDIDGKELAGATNELRDSS
GKTISTWISDGQVKDFYLMPGKYTFVETAAPDGYEVATAITFTVNEQGQVTVNGKATKGDAHIVNVDAYKPTKGS
GQVIDIEEKLPDEQGHSGSTTEIEDSKSSDVIIGGQGEVVDTTEDTQSGMTGHSGSTTEIEDSKSSDVIIGGQGE
VVDTTEDTQSGMTGHSGSTTKIEDSKSSDVIVGGQGQIVETTEDTQTGMHGDSGRKTEVEDTKLVQSFHFDNKEP
ESNSEIPKKDKSKSNTSLPATGEKQHNKFFWMVTSCSLISSVFVISLKSKKRLSSC

[1015] Examples of GAS AI-3 sequences from M3 strain isolate SSI-1 are set forth below.

[1016] Sps0099 is a negative transcriptional regulator Nra). An example of an amino acid sequence for Sps0099 is set forth in SEQ ID NO: 64.

SEQ ID NO: 64
MPYVKKKKDSFLVETYLEQSIRDKSELVLLLFKSPTIIFSRVAKQTGLTAVQLKYYCKELDDFFGWNLDITIKKG
KIICCFVKPVKEFYLHQLYDTSTILKLLVFFIKNGTSSQPLIKFSKKYFLSSSSAYRLRESLIKLLREFGLRVSK
NTIVGEEYRIRYLIAMLYSKFGIVIYPLDHLDNQIIYRFLSQSATNLRTSPWLEEPFSFYNMLLALSWKRHQFAV
SIPQTRIFRQLKKLFIYDCLTRSSRQVIENAFSLTFSQGDLEYLFLIYITTNNSFASLQWTPQHIETCCHIFEKN
DTFRLLLEPILKRLPQLNHSKQDLIKALMYFSKSFLFNLQHFVIEIPSFSLPTYTGNSNLYKALKNIVNQWLAQL
PGKRHLNEKHLQLFCSHIEQILKNKQPALTVVLISSNFINAKLLTDTIPRYFSDKGIHFYSFYLLRDDIYQIPSL
KPDLVITHSRLIPFVKNDLVKGVTVAEFSFDNPDYSIASIQNLIYQLKDKKYQDFLNEQLQ

[1017] Sps0100 is thought to be a collagen binding protein (Cbp). It contains a sortase substrate motif VPXTG shown in italics in SEQ ID NO: 65.

SEQ ID NO: 65
MQKRDKTNYGSANNKRRQTTIGLLKVELTFVALIGIVGFSIRAFGAEEQSVPNKQSSVQDYPWYGYDSYSKGYPD
YSPLKTYHNLKVNLDGSKEYQAYCFNLTKHFPSKSDSVRSQWYKKLEGTNENFIKLADKPRIEDGQLQQNILRIL
YNGYPNDRNGIMKGIDPLNAILVTQNAIWYYTDSSYISDTSKAFQQEETDLKLDSQQLQLMRNALKRLINPKEVE
SLPNQVPANYQLSIFQSSDKTFQNLLSAEYVPDTPPKPGEEPPAKTEKTSVIIRKYAEGDYSKLLEGATLKLAQI
EGSGFQEKIFDSNKSGEKVELPNGTYVLSELKPPQGYGVATPITFKVAAEKVLIKNKEGQFVENQNKEIAEPYSV
TAFNDFEEIGYLSDFNNYGKFYYAKNTNGTNQVVYCFNADLHSPPDSYDHGANIDPDVSESKEIKYTHVSGYDLY
KYAATPRDKDADFFLKHIKKILDKGYKKKGDTYKTLTEAQFRAATQLAIYYYTDSADLTTLKTYNDNKGYHGFDK
LDDATLAVVHELITYAEDVTLPHTQNLDFFVPNSSRYQALIGTQYHPNELIDVISNEDKQAPIIPITHKLTISKT
VTGTIADKKKEFNFEIHLKSSDGQAISGTYPTNSGELTVTDGKATFTLKDGESLIVEGLPSGYSYEITETGASDY
EVSVNGKNAPDGKATKASVKEDETVAFENRKDLVPPTGLTTDGAIYLWLLLLVPFGLLVWLFGRKGTKK

[1018] Sps0101 is referred to as a LepA protein. An example of an amino acid sequence of Sps0101 is set forth as SEQ ID NO: 66

SEQ ID NO: 66
MTNYLNRLNENPLLKAFIRLVLKISIIGFLGYILFQYVFGVMIVNTNQMSPAVSAGDGVLYYRLTDRYHINDVVV
YEVDDTLKVGRIAAQAGDEVNFTQEGGLLINGHPPEKEVPYLTYPHSSGPNFPYKVPTGTYFILNDYREERLDSR
YYGALPINQIKGKISTLLRVRGI

[1019] Sps0102 is thought to be a fimbrial protein. It contains a sortase substrate motif QVXTG shown in italics in SEQ ID NO: 67.

SEQ ID NO: 67
MEREKMKKNKLLLATAILATALGTASLNQNVKAETAGVSENAKLIVKKTFDSYTDNEVLMPKADYTFKVEADSTA
SGKTKDGLEIKPGIVNGLTEQIISYTNTDKPDSKVKSTEFDFSKVVFPGIGVYRYTVSEKQGDVEGITYDTKKWT
VDVYVGNKEGGGFEPKFIVSKEQGTDVKKPVNFNNSFATTSLKVKKNVSGNTGELQKEFDFTLTLNESTNFKKDQ
IVSLQKGNEKFEVKIGTPYKFKLKNGESIQLDKLPVGITYKVNEMEANKDGYKTTASLKEGDGQSKMYQLDMEQK
TDESADEIVVTNKRDTQVPTGVVGTLAPFAVLSIVAIGGVIYITKRKKA

[1020] Sps0103 is a SrtC2 type sortase. An example of Sps0103 is set forth in SEQ ID NO: 68.

SEQ ID NO: 68
MVMTIVQVINKAIDTLILIFCLVVLFLAGFGLWDSYHLYQQADASNFKKFKTAQQQPKFEDLLALNEDVIGWLNI
PGTHIDYPLVQGKTNLEYINKAVDGSVAMSGSLFLDTRNHNDFTDDYSLIYGHHMAGNAMFGEIPKFLKKDFFSK
HNKAIIETKERKKLTVTIFACLKTDAFNQLVFNPNAITNQDQQRQLVDYISKRSKQFKPVKLKHHTKFVAFSTCE
NFSTDNRVIVVGTIQE

[1021] Sps0104 is referred to as a hypothetical protein. It contains a sortase substrate motif LPXAG shown in italics in SEQ ID NO: 69.

SEQ ID NO: 69
MLFSVVMILTMLAFNQTVLAKDSTVQTSISVENVLERAGDSTPFSIALESIDAMKTIEEITIAGSGKASFSPLTF
TTVGQYTYRVYQKPSQNKDYQADTTVFDVLVYVTYDEDGTLVAKVISRRAGDEEKSAITFKPKWLVKPIPPRQPN
IPKTPLPLAGEVKSLLGILSIVLLGLLVLLYVKKLKSRL

[1022] Sps0105 is referred to as a putative multiple sugar metabolism regulator. An example of Sps0105 is set forth in SEQ ID NO: 70.

SEQ ID NO: 70
MALVPHFPINNVRNLLIAIDAFFDTQFETTCQQTIHQLLQHSKQMTADPDIIHRLKHISKASSQLPPVLEHLNHI
MDLVKLGNPQLLKQEINRIPLSSITSSSISALRAEKNLTVIYLTRLLEFSFVENTDVAKHYSLVKYYMALNEEAS
DLLKVLRIRCAAIIHFSESLTNKSISDKRQMYNSVLHYVDSHLYSKLKVSDIAKRLYVSESHLRSVFKKYSNVSL
QHYILSTKIKEAQLLLKRGIPVGEVAKSLYFYDTTHFHKIFKKYTGISSKDYLAKYRDNI

[1023] Sps0106 is thought to be a F2 like fibronectic binding protein. It contains a sortase substrate LPXTG (SEQ ID NO: 122) shown in italics in SEQ ID NO: 71.

SEQ ID NO: 71
MTQKNSYKLSFLLSLTGFILGLLLYFLGLSGVSVGHAETRNGANKQGAFEIKKNKSQEEYNYEVYDNRNILQDGE
HKLEIKRVDGTGKTYQGFCFQLTKNFPTAQGVSKKLYKKLSSSDEETLKQYASKYTSNRRGDTSGNLKKQIAKVL
TEGYPTNKSDWLNGLTENEKIEVTQDAIWYFTETTVPADRSYTNRNVNSQKMKEVYQKLIDTTDIDKYEDVQFDL
FVPQDTNLQAVISVEPVIESLPWTSLKPIAQKDITAKKIWVDAPKEKPIIYFKLYRQLPGEKEVAVDDAELKQIN
SEGQQEISVTWTNQLVTDEKGMAYIYSVKEVDKNGELLEPKDYIKKEDGLTVTNTYVKPTSGHYDIEVTFGNGHI
DITEDTTPDIVSGENQMKQIEGEDSKPIDEVTENNLIEFGKNTMPGEEDGTNSNKYEEVEDSRPVDTLSGLSSEQ
GQSGDMTIEEDSATHIKFSKRDIDGKELAGATMELRDSSGKTISTWISDGQVKDFYLMPGKYTFVETAAPDGYEV
ATAITFTVNEQGQVTVNGKATKGDAHIVMVDAYKPTKGSGQVIDIEEKLPDEQGHSGSTTEIEDSKSSDVIIGGQ
GEVVDTTEDTQSGMTGHSGSTTKIEDSKSSDVIVGGQGQIVETTEDTQTGMHGDSGRKTEVEDTKLVQSFHFDNK
EPESNSEIPKKDKSKSNTSLPATGEKQHNKFFWMVTSCSLISSVFVISLKSKKRLSSC

[1024] Examples of GAS AI-3 sequences from M5 isolate Manfredo are set forth below.

[1025] Orf77 encodes a negative transcription regulator (Nra). An example of the nucleotide sequence encoding Nra (SEQ ID NO: 88) and an Nra amino acid sequence (SEQ ID NO: 89) are set forth below.

SEQ ID NO: 88
ATGCCTTATGTCAAAAAGAAAAAGGATAGTTTCTTAGTAGAAACATATCTTGAACAGTCTATTAGAGATAAAAGT
GAATTAGTCTTACTGTTATTTAAATCGCCTACTATCATTTTTTCTCATGTTGCTAAACAAACTGGTCTGACGGCT
GTACAATTAAAATATTACTGTAAAGAACTTGATGACTTTTTTGGAAATAATTTAGACATTACCATTAAAAAGGGC
AAAATAATATGTTGTTTTGTCAAACCTGTTAAGGAATTCTACCTTCATCAACTCTATGACACATCAACAATATTA
AAATTATTAGTTTTCTTTATTAAAAATGGAACGTCATCACAACCTCTGATTAAATTTTCAAAAAAGTATTTTCTA
TCAAGCTCCTCAGCTTATCGACTACGGGAATCGCTGATCAAATTACTACGGGAATTTGGCTTGAGAGTCTCAAAA
AATACAATTGTCGGAGAGGAATATCGTATTCGCTATCTTATTGCCATGCTATATAGTAAATTTGGCATTGTCATC
TATCCGTTAGATCATCTAGACAATCAAATTATTTATCGCTTCTTATCACAAAGTGCAACCAATTTAAGAACATCG
CCCTGGCTAGAGGAACCTTTTTCTTTTTATAATATGTTACTTGCCTTGTCATGGAAACGTCACCAATTTGCAGTT
AGCATTCCTCAAACACGTATTTTTCGACAATTAAAAAAGCTTTTTATCTATGATTGTTTAACTCGAAGCAGTCGA
CAAGTAATCGAAAATGCTTTTTCGTTAATGTTCTCACAAGGAGATCTCGATTATCTTTTTTTAATTTATATTACC
ACCAATAATTCCTTTGCCAGCCTACAATGGACTCCACAGCATATTGAAACTTGCTGCCATATTTTTGAAAAAAAT
GACACATTTCGGTTATTGTTAGAGCCCATTCTTAAACGTTTACCGCAATTAAACCATTCTAAACAAGACCTTATT
AAAGCCCTTATGTATTTTTCAAAATCTTTTCTATTTAACCTCCAACATTTCGTCATCGAGATTCCTTCTTTTTCC
TTGCCGACCTATACAGGCAACTCTAATCTTTACAAAGCTTTAAAAAATATTGTAAATCAGTGGCTTGCTCAATTA
CCCGGAAAGCGTCATCTTAACGAAAAGCATCTCCAACTTTTTTGCTCTCATATTGAACAAATCTTAAAAAATAAA
CAACCTGCTTTAACTGTCGTTTTAATATCTAGTAACTTTATAAATGCTAAACTCCTTACAGATACTATCCCACGA
TATTTTTCTGATAAAGGAATTCATTTTTATTCTTTTTACTTATTAAGAGATGATATCTATCAAATTCCAAGCTTA
AAACCAGATTTAGTTATCACTCATAGCCGATTAATTCCTTTTGTTAAGAATGATCTGGTCAAAGGTGTTACTGTT
GCTGAATTTTCTTTTGATAACCCTGACTACTCTATTGCTTCAATTCAAAACTTGATATATCAGCTCAAAGATAAA
AAATATCAAGATTTTCTAAACGAGCAATTACAA
SEQ ID NO: 89
MPYVKKKKDSFLVETYLEQSIRDKSELVLLLFKSPTIIFSHVAKQTGLTAVQLKYYCKELDDFFGNNLDITIKKG
KIICCFVKPVKEFYLHQLYDTSTILKLLVFFIKNGTSSQPLIKFSKKYFLSSSSAYRLRESLIKLLREFGLRVSK
NTIVGEEYRIRYLIAMLYSKFGIVIYPLDHLDNQIIYRFLSQSATNLRTSPWLEEPFSFYNMLLALSWKRHQFAV
SIPQTRIFRQLKKLFIYDCLTRSSRQVIENAFSLMFSQGDLDYLFLIYITTNNSFASLQWTPQHIETCCHIFEKN
DTFRLLLEPILKRLPQLNHSKQDLIKALMYFSKSFLFNLQHFVIEIPSFSLPTYTGNSNLYKALKNIVNQWLAQL
PGKRHLNEKHLQLFCSHIEQILKNKQPALTVVLISSNFINAKLLTDTIPRYFSDKGIHFYSFYLLRDDIYQIPSL
KPDLVITHSRLIPFVKNDLVKGVTVAEFSFDNPDYSIASIQNLIYQLKDKKYQDFLNEQLQ

[1026] Orf78 is thought to be a collagen binding protein (Cbp). An example of the nucleotide sequence encoding Cbp (SEQ ID NO: 90) and a Cbp amino acid sequence (SEQ ID NO: 91) are set forth below.

SEQ ID NO: 90
TTGCAAAAGAGGGATAAAACCAATTATGGAAGCGCTAACAACAAACGACGACAAACGACGATCGGATTACTGAAA
GTATTTTTGACGTTTGTAGCTCTGATAGGAATAGTAGGGTTTTCTATCAGAGCGTTCGGAGCTGAAGAAAAATCT
ACTGAAACTAAAAAAACGTCAGTCATTATTAGAAAATATGCTGAAGGTGACTACTCTAAACTTCTAGAGGGAGCA
ACTTTGCGTTTAACAGGGGAAGATATCCCAGATTTTCAAGAAAAAGTCTTCCAAAGTAATGGAACAGGAGAAAAG
ATTGAATTATCAAATGGGACTTATACCTTAACAGAAACATCATCTCCAGATGGATATAAAATTACGGAGCCGATT
AAGTTTAGAGTAGTGAATAAAAAAGTATTTATCGTCCAAAAAGATGGTTCTCAAGTGGAAAACCCAAACAAAGAA
CTAGGTTCTCCATATACTATAGAGGCATACAATGATTTTGATGAATTTGGCTTACTGTCAACACAAAATTATGCG
AAATTTTATTATGGAAAAAACTATGATGGCAGTTCACAAATTGTTTATTGCTTCAATGCCAACTTGAAATCTCCA
CCTGACTCGGAAGATCATGGTGCTACAATAAATCCTGACTTTACGACTGGTGATATTAGGTACAGTCATATTGCT
GGTTCAGATTTGATAAAATACGCTAATACAGCTAGGGATGAAGATCCTCAATTATTTTTAAAACACGTAAAAAAA
GTAATTGAAAATGGGTATCATAAAAAAGGTCAAGCTATTCCATATAACGGTCTGACTGAGGCACAGTTTCGTGCG
GCTACTCAACTGGCAATTTATTATTTTACAGATAGTGTTGACTTAACTAAGGATAGATTGAAAGACTTCCATGGA
TTTGGAGATATGAATGATCAAACTTTGGGTGTAGCTAAAAAAATTGTAGAATACGCTTTGAGTGATGAAGATTCA
AAACTAACAAATCTTGATTTCTTCGTACCTAATAATAGCAAATACCAATCTCTTATTGGGACAGAATACCATCCA
GATGATTTGGTTGACGTGATTCGTATGGAAGATAAAAAGCAAGAAGTTATTCCAGTAACTCATAGTTTGACGGTG
CAAAAAACAGTAGTCGGTGAGTTGGGAGATAAGACTAAAGGCTTTCAATTTGAACTTGAGTTGAAAGATAAAACT
GGACAGCCTATTGTTAACACTCTAAAAACTAATAATCAAGATTTAGTAGCTAAAGATGGGAAATATTCATTTAAT
CTAAAGCATGGTGACACCATAAGAATAGAAGGATTACCGACGGGATATTCTTATACCCTGAAAGAGACTGAAGCT
AAGGATTATATAGTAACTGTTGATAACAAAGTTAGTCAAGAAGCTCAATCAGCAAGTGAGAATGTCACAGCAGAC
AAAGAAGTCACTTTTGAAAACCGAAAAGATCTTGTCCCACCAACTGGTTTGACAACAGATGGGGCTATCTATCTT
TGGTTATTACTACTTGTTCCATTTGGGTTATTGGTTTGGCTATTTGGTCGTAAAGGGTTAAAAAATGAC
SEQ ID NO: 91
MQKRDKTNYGSANNKRRQTTIGLLKVFLTFVALIGIVGFSIRAFGAEEKSTETKKTSVIIRKYAEGDYSKLLEGA
TLRLTGEDIPDFQEKVFQSNGTGEKIELSNGTYTLTETSSPDGYKITEPIKFRVVNKKVFIVQKDGSQVENPNKE
LGSPYTIEAYNDFDEFGLLSTQNYAKFYYGKNYDGSSQIVYCFNANLKSPPDSEDHGATINPDFTTGDIRYSHIA
GSDLIKYANTARDEDPQLFLKHVKKVIENGYHKKGQAIPYNGLTEAQFRAATQLAIYYFTDSVDLTKDRLKDFHG
FGDMNDQTLGVAKKIVEYALSDEDSKLTNLDFFVPNNSKYQSLIGTEYHPDDLVDVIRMEDKKQEVIPVTHSLTV
QKTVVGELGDKTKGFQFELELKDKTGQPIVNTLKTNNQDLVAKDGKYSFNLKHGDTIRIEGLPTGYSYTLKETEA
KDYIVTVDNKVSQEAQSASENVTADKEVTFENRKDLVPPTGLTTDGAIYLWLLLLVPFGLLVWLFGRKGLKND

[1027] Orf78 contains an amino acid motif indicative of a cell wall anchor: SEQ ID NO: 184 VPPTG (shown in italics in SEQ ID NO: 91, above). In some recombinant host cell systems, it may be preferable to remove this motif to facilitate secretion of a recombinant Orf78 protein from the host cell. Alternatively, in other recombinant host cell systems, it may be preferable to use the cell wall anchor motif to anchor the recombinantly expressed protein to the cell wall. The extracellular domain of the expressed protein may be cleaved during purification or the recombinant protein may be left attached to either inactivated host cells or cell membranes in the final composition.

[1028] Three E boxes containing conserved glutamic residues have been identified in Orf78. The E-box motifs are underlined in SEQ ID NO: 91, below. The conserved glutamic acid (E) residues, at amino acid residues 112, 395, and 447, are marked in bold. The E box motifs, in particular the conserved glutamic acid residues, are thought to be important for the formation of oligomeric pilus-like structures of Orf78. Preferred fragments of Orf78 include at least one conserved glutamic acid residue. Preferably, fragments include at least one E box motif.

SEQ ID NO: 91
MQKRDKTNYGSANNKRRQTTIGLLKVFLTFVALIGIVGFSIRAFGAEEKSTETKKTSVIIRKYAEGDYSKLLEGA
TLRLTGEDIPDFQEKVFQSNGTGEKIELSNGTYTLTETSSPDGYKITEPIKFRVVNKKVFIVQKDGSQVENPNKE
LGSPYTIEAYNDFDEFGLLSTQNYAKFYYGKNYDGSSQIVYCFNANLKSPPDSEDHGATINPDFTTGDIRYSHIA
GSDLIKYANTARDEDPQLFLKHVKKVIENGYHKKGQAIPYNGLTEAQFRAATQLAIYYFTDSVDLTKDRLKDFHG
FGDMNDQTLGVAKKIVEYALSDEDSKLTNLDFFVPNNSKYQSLIGTEYHPDDLVDVIRMEDKKQEVIPVTHSLTV
QKTVVGELGDKTKGFQFELELKDKTGQPIVNTLKTNNQDLVAKDGKYSFNLKHGDTIRIEGLPTGYSYTLKETEA
KDYIVTVDNKVSQEAQSASENVTADKEVTFENRKDLVPPTGLTTDGAIYLWLLLLVPFGLLVWLFGRKGLKND

[1029] Orf79 is thought to be a LepA signal peptidase I. An example of the nucleotide sequence encoding a LepA signal peptidase I (SEQ ID NO: 92) and a LepA signal peptidase I amino acid sequence (SEQ ID NO: 93) are set forth below.

SEQ ID NO: 92
ATGACTAATTACCTAAATCGTTTAAATGAGAATTCACTATTTAAAGCTTTCATACGGTTAGTACTTAAGATTTCT
ATTATTGGGTTTCTAGGTTACATTCTATTTCAGTATGTTTTTGGTGTTATGATTATTAACACTAATGATATGAGT
CCTGCTTTAAGTGCAGGTGACGGTGTTTTATATTATCGTTTGACTGATCGCTATCATATTAATGATGTGGTGGTC
TATGAGGTTGATAACACTTTGAAAGTTGGTCGAATTGTCGCTCAAGCTGGCGATGAGGTTAGTTTTACGCAAGAA
GGAGGACTGTTGATTAATGGGCATCCACCAGAAAAAGAGGTCCCTTACCTGACGTATCCTCACTCAAGTGGCCCA
AACTTTCCCTATAAAGTTCCTACGGGTAAGTATTTCATATTGAATGATTATCGTGAAGAACGTTTGGACAGTCGT
TATTATGGGGCGTTACCCGTCAATCAAATAAAAGGGAAAATCTCAACTCTATTAAGAGTGAGAGGAATT
SEQ ID NO: 93
MTNYLNRLNENSLFKAFIRLVLKISIIGFLGYILFQYVFGVMIINTNDMSPALSAGDGVLYYRLTDRYHINDVVV
YEVDNTLKVGRIVAQAGDEVSFTQEGGLLINGHPPEKEVPYLTYPHSSGPNFPYKVPTGKYFILNDYREERLDSR
YYGALPVNQIKGKISTLLRVRGI

[1030] Orf80 is thought to be a fimbrial protein. An example of the nucleotide sequence encoding the fimbrial protein (SEQ ID NO: 94) and a fimbrial protein amino acid sequence (SEQ ID NO: 95) are set forth below.

SEQ ID NO: 94
TTGGAGAGAGAAAAAATGAAAAAAAACAAATTATTACTTGCTACTGCAATCTTAGCAACTGCTTTAGGAACAGCT
TCTTTAAATCAAAACGTAAAAGCTGAGACGGCAGGGGTTGTAACAGGAAAATCACTACAAGTTACAAAGACAATG
ACTTATGATGATGAAGAGGTGTTAATGCCCGAAACCGCCTTTACTTTTACTATAGAGCCTGATATGACTGCAAGT
GGAAAAGAAGGCAGCCTAGATATTAAAAATGGAATTGTAGAAGGCTTAGACAAACAAGTAACAGTAAAATATAAG
AATACAGATAAAACATCTCAAAAAACTAAAATAGCACAATTTGATTTTTCTAAGGTTAAATTTCCAGCTATAGGT
GTTTACCGCTATATGGTTTCAGAGAAAAACGATAAAAAAGACGGAATTACGTACGATGATAAAAAGTGGACTGTA
GATGTTTATGTTGGGAATAAGGCCAATAACGAAGAAGGTTTCGAAGTTCTATATATTGTATCAAAAGAAGGTACT
TCTAGTACTAAAAAACCAATTGAATTTACAAACTCTATTAAAACTACTTCCTTAAAAATTGAAAAACAAATAACT
GGCAATGCAGGAGATCGTAAAAAATCATTCAACTTCACATTAACATTACAACCAAGTGAATATTATAAAACTGGA
TCAGTTGTGAAAATCGAACAGGATGGAAGTAAAAAAGATGTGACGATAGGAACGCCTTACAAATTTACTTTGGGA
CACGGTAAGAGTGTCATGTTATCGAAATTACCAATTGGTATCAATTACTATCTTAGTGAAGACGAAGCGAATAAA
GACGGCTACACTACAACGGCAACATTAAAAGAACAAGGCAAAGAAAAGAGTTCCGATTTCACTTTGAGTACTCAA
AACCAGAAAACAGACGAATCTGCTGACGAAATCGTTGTCACAAATAAGCGTGACACTCAAGTTCCAACTGGTGTT
GTAGGGACCCTTGCTCCATTTGCAGTTCTTAGCATTGTGGCTATTGGTGGAGTTATCTATATTACAAAACGTAAA
AAAGCT
SEQ ID NO: 95
MEREKMKKNKLLLATAILATALGTASLNQNVKAETAGVVTGKSLQVTKTMTYDDEEVLMPETAFTFTIEPDMTAS
GKEGSLDIKNGIVEGLDKQVTVKYKNTDKTSQKTKIAQFDFSKVKFPAIGVYRYMVSEKNDKKDGITYDDKKWTV
DVYVGNKANNEEGFEVLYIVSKEGTSSTKKPIEFTNSIKTTSLKIEKQITGNAGDRKKSFNFTLTLQPSEYYKTG
SVVKIEQDGSKKDVTIGTPYKFTLGHGKSVMLSKLPIGINYYLSEDEANKDGYTTTATLKEQGKEKSSDFTLSTQ
NQKTDESADEIVVTNKRDTQVPTGVVGTLAPFAVLSIVAIGGVIYITKRKKA

[1031] Orf82 contains an amino acid motif indicative of a cell wall anchor: SEQ ID NO: 140 QVPTG (shown in italics in SEQ ID NO: 95, above). In some recombinant host cell systems, it may be preferable to remove this motif to facilitate secretion of a recombinant Orf82 protein from the host cell. Alternatively, in other recombinant host cell systems, it may be preferable to use the cell wall anchor motif to anchor the recombinantly expressed protein to the cell wall. The extracellular domain of the expressed protein may be cleaved during purification or the recombinant protein may be left attached to either inactivated host cells or cell membranes in the final composition.

[1032] An E box containing a conserved glutamic residue has been identified in Orf80. The E-box motif is underlined in SEQ ID NO: 95, below. The conserved glutamic acid (E), at amino acid residue 270, is marked in bold. The E box motif, in particular the conserved glutamic acid residue, is

[symbol]

fragments of Orf80 include at least one conserved glutamic acid residue. Preferably, fragments include at least one E box motif.

SEQ ID NO: 95
MEREKMKKNKLLLATAILATALGTASLNQNVKAETAGVVTGKSLQVTKTMTYDDEEVLMPETAFTFTIEPDMTAS
GKEGSLDIKNGIVEGLDKQVTVKYKNTDKTSQKTKIAQFDFSKVKFPAIGVYRYMVSEKNDKKDGITYDDKKWTV
DVYVGNKANNEEGFEVLYIVSKEGTSSTKKPIEFTNSIKTTSLKIEKQITGNAGDRKKSFNFTLTLQPSEYYKTG
SVVKIEQDGSKKDVTIGTPYKFTLGHGKSVMLSKLPIGINYYLSEDEANKDGYTTTATLKEQGKEKSSDFTLSTQ
NQKTDESADEIVVTNKRDTQVPTGVVGTLAPFAVLSIVAIGGVIYITKRKKA

[1033] Orf81 is thought to be a SrtC2 type sortase. An example of the nucleotide sequence encoding the SrtC2 sortase (SEQ ID NO: 96) and a SrtC2 sortase amino acid sequence (SEQ ID NO: 97) are set forth below.

SEQ ID NO: 96
GTGATTAGTCAAAGAATGATGATGACAATTGTACAGGTTATCAATAAAGCCATTGATACTCTCATTCTTATCTTT
TGTTTAGTCGTACTATTTTTAGCTGGTTTTGGTTTGTGGGATTCTTATCATCTCTATCAACAAGCAGACGCTTCT
AATTTCAAAAAATTTAAAACAGCTCAACAACAGCCTAAATTTGAAGACTTGTTAGCTTTGAATGAGGATGTCATT
GGTTGGTTAAATATCCCAGGGACTCATATTGATTATCCTCTAGTTCAGGGAAAAACGAATTTAGAGTATATTAAT
AAAGCAGTTGATGGCAGTGTTGCCATGTCTGGTAGTTTATTTTTAGATACACGGAATCATAATGATTTTACGGAC
GATTACTCTCTGATTTATGGCCATCATATGGCAGGTAATGCCATGTTTGGCGAAATTCCAAAATTTTTAAAAAAG
GATTTTTTCAACAAACATAATAAAGCTATCATTGAAACAAAAGAGAGAAAAAAACTAACCGTCACTATTTTTGCT
TGTCTCAAGACAGATGCCTTTGACCAGTTAGTTTTTAATCCTAATGCTATTACCAATCAAGACCAACAAAAGCAG
CTCGTTGATTATATCAGTAAAAGATCAAAACAATTTAAACCTGTTAAATTGAAGCATCATACAAAGTTCGTTGCT
TTTTCAACGTGTGAAAATTTTTCTACTGACAATCGTGTTATCGTTGTCGGTACTATTCAAGAA
SEQ ID NO: 97
MISQRMMMTIVQVINKAIDTLILIFCLVVLFLAGFGLWDSYHLYQQADASNFKKFKTAQQQPKFEDLLALNEDVI
GWLNIPGTHIDYPLVQGKTNLEYINKAVDGSVAMSGSLFLDTRNHNDFTDDYSLIYGHHMAGNAMFGEIPKFLKK
DFFNKHNKAIIETKERKKLTVTIFACLKTDAFDQLVFNPNAITNQDQQKQLVDYISKRSKQFKPVKLKHHTKFVA
FSTCENFSTDNRVIVVGTIQE

[1034] Orf82 is referred to as a hypothetical protein. It contains a sortase substrate motif LPXAG shown in italics in SEQ ID NO: 99. An example of the nucleotide sequence encoding the hypothetical protein (SEQ ID NO: 98) and a hypothetical protein amino acid sequence (SEQ ID NO: 99) are set forth below.

SEQ ID NO: 98
TTGCTTTTTCAACGTGTGAAAATTTTTCTACTGACAATCGTGTTATCGTTGTCGGTACTATTCAAGAATAACGAA
AGGAGGAGACTTTTGAGAAAATATTGGAAAATGTTATTTTCTGTCGTAATGATATTAACCATGCTGGCCTTTAAT
CAGACTGTTTTAGCAAAAGACAGCACTGTTCAAACTAGCATTAGTGTCGAAAATGTCTTAGAGAGAGCAGGCGAT
AGTACCCCATTTTCGGTTGCATTAGAATCAATTGATGCGATGAAAACAATAGACGAAATAACAATTGCTGGTTCT
GGAAAAGCAAGCTTTTCCCCTCTGACCTTCACAACAGTTGGGCAATATACTTATCGTGTTTATCAGAAGCCTTCA
CAAAATAAAGATTATCAAGCAGATACTACTGTATTTGACGTTCTTGTCTATGTGACCTATGATGAAGATGGGACT
CTAGTCGCAAAAGTTATTTCTCGAAGGGCTGGAGACGAAGAAAAATCAGCGATTACTTTTAAGCCCAAACGGTTA
GTAAAACCAATACCGCCTAGACAACCTAACATCCCTAAAACCCCATTACCATTAGCTGGTGAAGTAAAAAGTTTA
TTGGGTATCTTAAGTATCGTATTACTGGGGTTACTAGTTCTTCTTTATGTTAAAAAACTGAAGAGTAGGCTA
SEQ ID NO: 99
MLFQRVKIFLLTIVLSLSVLFKNNERRRLLRKYWKMLFSVVMILTMLAFNQTVLAKDSTVQTSISVENVLERAGD
STPFSVALESIDAMKTIDEITIAGSGKASFSPLTFTTVGQYTYRVYQKPSQNKDYQADTTVFDVLVYVTYDEDGT
LVAKVISRRAGDEEKSAITFKPKRLVKPIPPRQPNIPKTPLPLAGEVKSLLGILSIVLLGLLVLLYVKKLKSRL

[symbol]

LPLAG (shown in italics in SEQ ID NO: 99, above). In some recombinant host cell systems, it may be preferable to remove this motif to facilitate secretion of a recombinant Orf82 protein from the host cell. Alternatively, in other recombinant host cell systems, it may be preferable to use the cell wall anchor motif to anchor the recombinantly expressed protein to the cell wall. The extracellular domain of the expressed protein may be cleaved during purification or the recombinant protein may be left attached to either inactivated host cells or cell membranes in the final composition.

[1035] A pilin motif, discussed above, containing a conserved lysine (K) residue has also been identified in Orf82. The pilin motif sequence is underlined in SEQ ID NO: 99, below. Conserved lysine (K) residues are also marked in bold, at amino acid residues 173 and 188. The pilin sequence, in particular the conserved lysine residues, are thought to be important for the formation of oligomeric, pilus-like structures. Preferred fragments of Orf82 include at least one conserved lysine residue. Preferably, fragments include the pilin sequence.

SEQ ID NO: 99
MLFQRVKIFLLTIVLSLSVLFKNNERRRLLRKYWKMLFSVVMILTMLAFNQTVLAKDSTVQTSISVENVLERAGD
STPFSVALESIDAMKTIDEITIAGSGKASFSPLTFTTVGQYTYRVYQKPSQNKDYQADTTVFDVLVYVTYDEDGT
LVAKVISRRAGDEEKSAITFKPKRLVKPIPPRQPNIPKTPLPLAGEVKSLLGILSIVLLGLLVLLYVKKLKSRL

[1036] An E box containing a conserved glutamic residue has been identified in Orf82. The E-box motif is underlined in SEQ ID NO: 99, below. The conserved glutamic acid (E), at amino acid residue 163, is marked in bold. The E box motif, in particular the conserved glutamic acid residue, is thought to be important for the formation of oligomeric pilus-like structures of Orf82. Preferred fragments of Orf82 include the conserved glutamic acid residue. Preferably, fragments include the E box motif.

SEQ ID NO: 99
MLFQRVKIFLLTIVLSLSVLFKNNERRRLLRKYWKMLFSVVMILTMLAFNQTVLAKDSTVQTSISVENVLERAGD
STPFSVALESIDAMKTIDEITIAGSGKASFSPLTFTTVGQYTYRVYQKPSQNKDYQADTTVFDVLVYVTYDEDGT
LVAKVISRRAGDEEKSAITFKPKRLVKPIPPRQPNIPKTPLPLAGEVKSLLGILSIVLLGLLVLLYVKKLKSRL

[1037] Orf83 is thought to be a multiple sugar metabolism regulator protein. An example of a nucleotide sequence encoding the sugar metabolism regulator protein (SEQ ID NO: 100) and a sugar metabolism regulator protein amino acid sequence (SEQ ID NO: 101) are set forth below.

SEQ ID NO: 100
ATGATACAACTAAGGATGGGGGCAATCTATCAAATGGTTATATTCGATTTAAAACATGTGCAAACATTACACAGC
TTGTCTCAATTACCTATTTCAGTGATGTCACAAGATAAGGCACTTATTCAAGTATATGGTAATGACGACTATTTA
TTATGTTACTATCAATTTTTAAAGCATCTAGCTATTCCTCAAGCTGCACAAGATGTTATTTTTTATGAGGGTTTA
TTTGAAGAGTCCTTTATGATTTTTCCTCTTTGTCACTACATTATTGCCATTGGACCTTTCTATCCTTATTCACTT
AATAAAGACTATCAGGAACAATTAGCTAATAATTTTTTAAAACATTCTTCTCATCGTAGCAAAGAAGAGCTCTTG
TCCTATATGGCACTTGTCCCACATTTTCCAATTAATAATGTGCGGAACCTTTTGATAGCTATTGACGCTTTTTTT
GACACACAATTTGAGACGACTTGCCAACAAACGATTCATCAATTGTTGCAGCATTCAAAACAGATGACTGCTGAT
CCTGATATCATTCATCGCCTTAAGCATATTAGCAAAGCATCTAGCCAATTACCGCCTGTTTTAGAGCACCTAAAT
CATATTATGGATCTGGTAAAGCTAGGCAATCCACAATTGCTCAAGCAAGAAATCAATCGCATCCCCTTATCAAGT
ATCACCTCATCTTCTATTTCTGCTCTAAGGGCGGAAAAGAACCTCACTGTTATCTATTTAACTAGGTTACTGGAA
TTCAGTTTTGTAGAAAATACTGACGTAGCAAAGCATTATAGCCTTGTCAAATACTACATGGCCTTAAATGAAGAA
GCGAGTGACTTGCTCAAAGTTTTGAGAATTCGCTGTGCAGCTATCATCCATTTTTCCGAATCATTAACCAATAAA
AGTATTTCTGATAAACGTCAAATGTACAATAGTGTGCTTCATTATGTCGATAGTCACCTGTATTCCAAATTAAAG
GTATCTGATATCGCTAAGCGCCTATATGTTTCCGAATCTCACTTACGTTCAGTCTTTAAAAAATACTCAAATGTT
TCCTTACAACATTATATTCTAAGTACAAAAATCAAAGAAGCTCAACTACTCTTAAAACGAGGAATTCCTGTTGGA
GAAGTGGCTAAAAGCTTATATTTTTATGACACTACCCATTTTCATAAAATCTTTAAAAAATACACGGGTATTTCT
TCAAAAGACTATCTTGCTAAATACCGAGATAATATT
SEQ ID NO: 101

MIQLRMGAIYQMVIFDLKHVQTLHSLSQLPISVMSQDKALIQVYGNDDYLLCYYQFLKHLAIPQAAQDVIFYEGL
FEESFMIFPLCHYIIAIGPFYPYSLNKDYQEQLANNFLKHSSHRSKEELLSYMALVPHFPINNVRNLLIAIDAFF
DTQFETTCQQTIHQLLQHSKQMTADPDIIHRLKHISKASSQLPPVLEHLNHIMDLVKLGNPQLLKQEINRIPLSS
ITSSSISALRAEKNLTVIYLTRLLEFSFVENTDVAKHYSLVKYYMALNEEASDLLKVLRIRCAAIIHFSESLTNK
SISDKRQMYNSVLHYVDSHLYSKLKVSDIAKRLYVSESHLRSVFKKYSNVSLQHYILSTKIKEAQLLLKRGIPVG
EVAKSLYFYDTTHFHKIFKKYTGISSKDYLAKYRDNI

[1038] Orf84 is thought to be a F2-like fibronectin-binding protein. An example of a nucleotide sequence encoding the F2-like fibronectin-binding protein (SEQ ID NO: 102) and a F2-like fibronectin-binding protein amino acid sequence (SEQ ID NO: 103) are set forth below.

SEQ ID NO: 102
ATGACACAAAAAAATAGCTATAAGTTAAGCTTCCTGTTATCCCTAACAGGATTTATTTTAGGTTTATTATTGGTT
TTTATAGGATTGTCCGGAGTATCAGTAGGACATGCGGAAACAAGAAATGGAGCAAACAAACAAGGAGCTTTTGAA
ATCAAGAAAAATAAAAGTCAAGAAGAATATAATTATGAAGTTTATGATAACAGAAACATACTTCAGGATGGGGAA
CATAAACTTGAAATAAAAAGAGTTGATGGGACAGGTAAAACTTATCAAGGTTTTTGCTTTCAGTTAACGAAAAAT
TTTCCCACTGCTCAAGGTGTAAGTAAAAAGCTGTATAAAAAATTGAGTAGTAGTGATGAAGAAACACTAAAGCAA
TATGCCTCTAAGTATACAAGTAATAGGAGAGGAGATACTAGTGGTAATCTTAAAAAGCAAATTGCTAAGGTTCTG
ACAGAAGGTTACCCAACTAACAAAAGTGATTGGTTAAATGGATTGACTGAAAACGAAAAAATAGAAGTAACCCAG
GATGCAATTTGGTATTTTACAGAAACGACAGTTCCGGCTGATAGAAGTTATACGAATCGCAACGTAAATAGTCAA
AAAATGAAAGAAGTGTATCAAAAGCTAATTGATACAACAGATATAGATAAATATGAAGATGTACAATTTGATTTA
TTTGTGCCACAAGATACAAACTTACAGGCAGTAATTAGTGTAGAGCCTGTTATCGAAAGCCTTCCTTGGACATCG
TTGAAGCCAATAGCCCAGAAGGATATCACTGCCAAAAAAATCTGGGTAGATGCACCTAAAGAAAAACCAATTATT
TATTTTAAGCTATATAGACAGCTGCCTGGAGAAAAGGAAGTAGCAGTGGATGACGCTGAGCTAAAACAGAThAAT
AGTGAAGGTCAACAAGAAATATCAGTAACTTGGACAAATCAACTTGTTACAGATGAAAAAGGAATGGCTTACATT
TATTCTGTAAAAGAAGTAGATAAAAATGGCGAGTTACTTGAGCCAAAAGATTATATCAAGAAGGAAGATGGACTT
ACAGTTACTAATACTTATGTAAAGCCAACTAGTGGGCACTATGATATAGAAGTGACATTTGGAAATGGACATATT
GATATTACAGAAGATACTACACCAGATATTGTTTCAGGTGAAAACCAAATGAAGCAAATAGAGGGAGAAGATAGT
AAGCCTATTGATGAAGTAACGGAAAATAATTTAATTGAATTTGGTAAAAACACGATGCCAGGTGAAGAAGATGGC
ACAAATTCTAATAAGTATGAAGAAGTCGAAGACTCACGCCCAGTTGATACCTTGTCAGGTTTATCAAGTGAGCAA
GGTCAGTCCGGTGATATGACAATTGAAGAAGATAGTGCTACCCATATTAAATTCTCAAAACGTGATATTGACGGC
AAAGAGTTAGCTGGTGCAACTATGGAGTTGCGTGATTCATCTGGTAAAACTATTAGTACATGGATTTCAGATGGA
CAAGTGAAAGATTTCTACCTGATGCCAGGAAAATATACATTTGTCGAAACCGCAGCACCAGACGGTTATGAGATA
GCAACTGCTATTACCTTTACAGTTAATGAGCAAGGTCAGGTTACTGTAAATGGCAAAGCAACTAAAGGTGACGCT
CATATTGTCATGGTTGATGCTTACAAGCCAACTAAGGGTTCAGGTCAGGTTATTGATATTGAAGAAAAGCTTCCA
GACGAGCAGGGCCATTCTGGCTCAACTACTGAAATAGAAGATAGCAAGTCTTCAGACGTTATCATTGGTGGTCAG
GGGCAGATTGTCGAGACAACAGAGGATACCCAAACTGGCATGCACGGGGATTCTGGTTGTAAAACGGAAGTCGAA
GATACTAAACTAGTACAATCCTTCCACTTTGATAACAAGGAATCAGAAAGTAACTCTGAGATTCCTAAAAAAGAT
AAGCCAAAGAGTAATACTAGTTTACCAGCAACTGGTGAGAAGCAACATAATATGTTCTTTTGGATGGTTACTTCT
TGCTCACTTATTAGTAGTGTTTTTGTAATATCACTAAAAACTAAAAAACGCCTATCATCATGT
SEQ ID NO: 103
MTQKNSYKLSFLLSLTGFILGLLLVFIGLSGVSVGHAETRNGANKQGAFEIKKNKSQEEYNYEVYDNRNILQDGE
HKLEIKRVDGTGKTYQGFCFQLTKNFPTAQGVSKKLYKKLSSSDEETLKQYASKYTSNRRGDTSGNLKKQIAKVL
TEGYPTNKSDWLNGLTENEKIEVTQDAIWYFTETTVPADRSYTNRNVNSQKMKEVYQKLIDTTDIDKYEDVQFDL
FVPQDTNLQAVISVEPVIESLPWTSLKPIAQKDITAKKIWVDAPKEKPIIYFKLYRQLPGEKEVAVDDAELKQIN
SEGQQEISVTWTNQLVTDEKGMAYIYSVKEVDKNGELLEPKDYIKKEDGLTVTNTYVKPTSGHYDIEVTFGNGHI
DITEDTTPDIVSGENQMKQIEGEDSKPIDEVTENNLIEFGKNTMPGEEDGTNSNKYEEVEDSRPVDTLSGLSSEQ
GQSGDMTIEEDSATHIKFSKRDIDGKELAGATMELRDSSGKTISTWISDGQVKDFYLMPGKYTFVETAAPDGYEI
ATAITFTVNEQGQVTVNGKATKGDAHIVMVDAYKPTKGSGQVIDIEEKLPDEQGHSGSTTEIEDSKSSDVIIGGQ
GQIVETTEDTQTGMHGDSGCKTEVEDTKLVQSFHFDNKESESNSEIPKKDKPKSNTSLPATGEKQHNMFFWNVTS
CSLISSVFVISLKTKKRLSSC

[symbol]

LPATG (shown in italics in SEQ ID NO: 103, above). In some recombinant host cell systems, it may be preferable to remove this motif to facilitate secretion of a recombinant Orf84 protein from the host cell. Alternatively, in other recombinant host cell systems, it may be preferable to use the cell wall anchor motif to anchor the recombinantly expressed protein to the cell wall. The extracellular domain of the expressed protein may be cleaved during purification or the recombinant protein may be left attached to either inactivated host cells or cell membranes in the final composition.

[1039] A pilin motif, discussed above, containing a conserved lysine (K) residue has also been identified in Orf84. The pilin motif sequence is underlined in SEQ ID NO: 103, below. A conserved lysine (K) residue is also marked in bold, at amino acid residue 270. The pilin sequence, in particular the conserved lysine residue, is thought to be important for the formation of oligomeric, pilus-like structures. Preferred fragments of Orf84 include the conserved lysine residue. Preferably, fragments include the pilin sequence.

SEQ ID NO: 103
MTQKNSYKLSFLLSLTGFILGLLLVFIGLSGVSVGHAETRNGANKQGAFEIKKNKSQEEYNYEVYDNRNILQDGE
HKLEIKRVDGTGKTYQGFCFQLTKNFPTAQGVSKKLYKKLSSSDEETLKQYASKYTSNRRGDTSGNLKKQIAKVL
TEGYPTNKSDWLNGLTENEKIEVTQDAIWYFTETTVPADRSYTNRNVNSQKMKEVYQKLIDTTDIDKYEDVQFDL
FVPQDTNLQAVISVEPVIESLPWTSLKPIAQKDITAKKIWVDAPKEKPIIYFKLYRQLPGEKEVAVDDAELKQIN
SEGQQEISVTWTNQLVTDEKGMAYIYSVKEVDKNGELLEPKDYIKKEDGLTVTNTYVKPTSGHYDIEVTFGNGHI
DITEDTTPDIVSGENQMKQIEGEDSKPIDEVTENNLIEFGKNTMPGEEDGTNSNKYEEVEDSRPVDTLSGLSSEQ
GQSGDMTIEEDSATHIKFSKRDIDGKELAGATMELRDSSGKTISTWISDGQVKDFYLMPGKYTFVETAAPDGYEI
ATAITFTVNEQGQVTVNGKATKGDAHIVMVDAYKPTKGSGQVIDIEEKLPDEQGHSGSTTEIEDSKSSDVIIGGQ
GQIVETTEDTQTGMHGDSGCKTEVEDTKLVQSFHFDNKESESNSEIPKKDKPKSNTSLPATGEKQHNMFFWMVTS
CSLISSVFVISLKTKKRLSSC

[1040] An E box containing a conserved glutamic residue has been identified in Orf84. The E-box motif is underlined in SEQ ID NO: 103, below. The conserved glutamic acid (E), at amino acid residue 516, is marked in bold. The E box motif, in particular the conserved glutamic acid residue, is thought to be important for the formation of oligomeric pilus-like structures of Orf84. Preferred fragments of Orf84 include the conserved glutamic acid residue. Preferably, fragments include the E box motif.

SEQ ID NO: 103
MTQKNSYKLSFLLSLTGFILGLLLVFIGLSGVSVGHAETRNGANKQGAFEIKKNKSQEEYNYEVYDNRNILQDGE
HKLEIKRVDGTGKTYQGFCFQLTKNFPTAQGVSKKLYKKLSSSDEETLKQYASKYTSNRRGDTSGNLKKQIAKVL
TEGYPTNKSDWLNGLTENEKIEVTQDAIWYFTETTVPADRSYTNRNVNSQKMKEVYQKLIDTTDIDKYEDVQFDL
FVPQDTNLQAVISVEPVIESLPWTSLKPIAQKDITAKKIWVDAPKEKPIIYFKLYRQLPGEKEVAVDDAELKQIN
SEGQQEISVTWTNQLVTDEKGMAYIYSVKEVDKNGELLEPKDYIKKEDGLTVTNTYVKPTSGHYDIEVTFGNGHI
DITEDTTPDIVSGENQMKQIEGEDSKPIDEVTENNLIEFGKNTMPGEEDGTNSNKYEEVEDSRPVDTLSGLSSEQ
GQSGDMTIEEDSATHIKFSKRDIDGKELAGATMELRDSSGKTISTWISDGQVKDFYLMPGKYTFVETAAPDGYEI
ATAITFTVNEQGQVTVNGKATKGDAHIVMVDAYKPTKGSGQVIDIEEKLPDEQGHSGSTTEIEDSKSSDVIIGGQ
GQIVETTEDTQTGMHGDSGCKTEVEDTKLVQSFHFDNKESESNSEIPKKDKPKSNTSLPATGEKQHNMFFWMVTS
CSLISSVFVISLKTKKRLSSC

[1041] Examples of GAS AI-3 sequences from M18 strain isolate MGAS8232 are set forth below.

[1042] SpyM18_{—}0125 is a negative transcriptional regulator (Nra). An example of SpyM18_{—}0125 is set forth in SEQ ID NO: 72.

SEQ ID NO: 72

MPYVKKKKDSFLVETYLEQSIRDKSELVLLLFKSPTIIFSHVAKQTGLTA
VQLKYYCKELDDFFGNNLDITIKKGKIICCFVKPVKEFYLHQLYDTSTIL
KLLVFFIKNGTTSQPLIKFSKKYFLSSSSAYRLRESLIKLLREFGLRVSK
NTIVGEEYRIRYLIAMLYSKFGIVIYPLDHLDNQIIYRFLSQSATNLRTS
PWLEEPFSFYNMLLALS

[1043] SpyM18_{—}0126 is thought to be a collagen binding protein (CBP). An example of SpyM18_{—}0126 is set forth in SEQ ID NO: 73.

SEQ ID NO: 73

MQKRDKTNYGSANNKRRQTTIGLLKVFLTFVALIGIVGFSIRAFGAEEQS
TETKKTSVIIRKYAEGDYSKLLEGATLKLAQIEGSGFQEQSFESSTSGQK
LQLSDGTYILTETKSPQGYEIAEPITFKVTAGKVFIKGKDGQFVENQNKE
VAEPYSVTAYNDFDDSGFINPKTFTPYGKFYYAKNANGTSQVVYCFNVDL
HSPPDSLDKGETIDPDFNEGKEIKYTHILGADLFSYANNPRASTNDELLS
QVKKVLEKGYRDDSTTYANLTSVEFRAATQLAIYYFTDSVDLDNLADYHG
FGALTTEALNATKEIVAYAEDRANLPNISNLDFYVPNSNKYQSLIGTQYH
PESLVDIIRMEDKQAPIIPITHKLTISKTVTGTIADKKKEFNFEIHLKSS
DGQAISGTYPTNSGELTVTDGKATFTLKDGESLIVEGLPSGYSYEITETG
ASDYEVSVNGKNAPDGKATKASVKEDETITFENRKDLVPPTGLTTDGAIY
LWLLLLVLLGLWVWLIGRKGLKND

[1044] SpyM18_{—}0126 contains an amino acid motif indicative of a cell wall anchor. SEQ ID NO: 184 VPPTG (shown in italics in SEQ ID NO: 73, above). In some recombinant host cell systems, it may be preferable to remove this motif to facilitate secretion of a recombinant SpyM18_{—}0126 protein from the host cell. Alternatively, in other recombinant host cell systems, it may be preferable to use the cell wall anchor motif to anchor the recombinantly expressed protein to the cell wall. The extracellular domain of the expressed protein may be cleaved during purification or the recombinant protein may be left attached to either inactivated host cells or cell membranes in the final composition.

[1045] A pilin motif, discussed above, containing a conserved lysine (K) residue has also been identified in SpyM18_{—}0126. The pilin motif sequence is underlined in SEQ ID NO: 73, below. Conserved lysine (K) residues are also marked in bold, at amino acid residues 172 and 179. The pilin sequence, in particular the conserved lysine residues, are thought to be important for the formation of oligomeric, pilus-like structures. Preferred fragments of SpyM18_{—}0126 include at least one conserved lysine residue. Preferably, fragments include the pilin sequence.

SEQ ID NO: 73
MQKRDKTNYGSANNKRRQTTIGLLKVFLTFVALIGIVGFSIRAFGAEEQSTETKKTSVIIRKYAEGDYSKLLEGA
TLKLAQIEGSGFQEQSFESSTSGQKLQLSDGTYILTETKSPQGYEIAEPITFKVTAGKVFIKGKDGQFVENQNKE
VAEPYSVTAYNDFDDSGFINPKTFTPYGKFYYAKNANGTSQVVYCFNVDLHSPPDSLDKGETIDPDFNEGKEIKY
THILGADLFSYANNPRASTNDELLSQVKKVLEKGYRDDSTTYANLTSVEFRAATQLAIYYFTDSVDLDNLADYHG
FGALTTEALNATKEIVAYAEDRANLPNISNLDFYVPNSNKYQSLIGTQYHPESLVDIIRMEDKQAPIIPITHKLT
ISKTVTGTIADKKKEFNFEIHLKSSDGQAISGTYPTNSGELTVTDGKATFTLKDGESLIVEGLPSGYSYEITETG
ASDYEVSVNGKNAPDGKATKASVKEDETITFENRKDLVPPTGLTTDGAIYLWLLLLVLLGLWVWLIGRKGLKND

[1046] Three E boxes containing conserved glutamic residues have been identified in SpyM18_{—}0126. The E-box motifs are underlined in SEQ ID NO: 73, below. The conserved glutamic acid (E) residues, at amino acid residues 112, 257, and 415, are marked in bold. The E box motifs, in particular the conserved glutamic acid residues, are thought to be important for the formation of oligomeric pilus-like structures of SpyM18_{—}0126. Preferred fragments of SpyM18_{—}0126 include at least one conserved glutamic acid residue. Preferably, fragments include at least one E box motif.

SEQ ID NO: 73
MQKRDKTNYGSANNKRRQTTIGLLKVFLTFVALIGIVGFSIRAFGAEEQSTETKKTSVIIRKYAEGDYSKLLEGA
TLKLAQIEGSGFQEQSFESSTSGQKLQLSDGTYILTETKSPQGYEIAEPITFKVTAGKVFIKGKDGQFVENQNKE
VAEPYSVTAYNDFDDSGFINPKTFTPYGKFYYAKNANGTSQVVYCFNVDLHSPPDSLDKGETIDPDFNEGKEIKY
THILGADLFSYANNPRASTNDELLSQVKKVLEKGYRDDSTTYANLTSVEFRAATQLAIYYFTDSVDLDNLADYHG
FGALTTEALNATKEIVAYAEDRANLPNISNLDFYVPNSNKYQSLIGTQYHPESLVDIIRMEDKQAPIIPITHKLT
ISKTVTGTIADKKKEFNFEIHLKSSDGQAISGTYPTNSGELTVTDGKATFTLKDGESLIVEGLPSGYSYEITETG
ASDYEVSVNGKNAPDGKATKASVKEDETITFENRKDLVPPTGLTTDGAIYLWLLLLVLLGLWVWLIGRKGLKND

[1047] SpyM18_{—}0127 is a LepA protein. An example of SpyM18_{—}0127 is shown in SEQ ID NO: 74.

SEQ ID NO: 74
MTNYLNRLNENPLFKAFIRLVLKISIIGFLGYILFQYIFGVMIINTNVMSPALSAGDGILYYRLTDRYHINDVVV
YEVDNTLKVGRIVAQAGDEVSFTQEGGLLINGHPPEKEVPYLTYPHSSGPNFPYKVPTGTYFILNDYREERLDSR
YYGALPINQIKGKISTLLRVRGI

[1048] SpyM18_{—}0128 is thought to be a fimbrial protein. An example of SpyM18_{—}0128 is shown in SEQ ID NO: 75.

SEQ ID NO: 75
MKKNKLLLATAILATALGTASLNQNVKAETAGVIDGSTLVVKKTFPSYTDDKVLMPKADYTFKVEADDNAKGKTK
DGLDIKPGVIDGLENTKTIHYGNSDKTTAKEKSVNFDFANVKFPGVGVYRYTVSEVNGNKAGIAYDSQQWTVDVY
VVNREDGGFEAKYIVSTEGGQSDKKPVLFKNFFDTTSLKVTKKVTGNTGEHQRSFSFTLLLTPNECFEKGQVVNI
LQGGETKKVVIGEEYSFTLKDKESVTLSQLPVGIEYKVTEEDVTKDGYKTSATLKDGDVTDGYNLGDSKTTDKST
DEIVVTNKRDTQVPTGVVGTLAPFAVLSIVAIGGVIYITKRKKA

[1049] SpyM18_{—}0128 contains an amino acid motif indicative of a cell wall anchor: SEQ ID NO: 140 QVPTG (shown in italics in SEQ ID NO: 75, above). In some recombinant host cell systems, it may be preferable to remove this motif to facilitate secretion of a recombinant SpyM18_{—}0128 protein from the host cell. Alternatively, in other recombinant host cell systems, it may be preferable to use the cell wall anchor motif to anchor the recombinantly expressed protein to the cell wall. The extracellular domain of the expressed protein may be cleaved during purification or the recombinant protein may be left attached to either inactivated host cells or cell membranes in the final composition.

[1050] A pilin motif, discussed above, containing a conserved lysine (K) residue has also been identified in SpyM18_{—}0128. The pilin motif sequence is underlined in SEQ ID NO: 75, below. A conserved lysine (K) residue is also marked in bold, at amino acid residue 57. The pilin sequence, in particular the conserved lysine residue, is thought to be important for the formation of oligomeric, pilus-like structures. Preferred fragments of SpyM18_{—}0128 include the conserved lysine residue. Preferably, fragments include at least one pilin sequence.

SEQ ID NO: 75
MKKNKLLLATAILATALGTASLNQNVKAETAGVIDGSTLVVKKTFPSYTDDKVLMPKADYTFKVEADDNAKGKTK
DGLDIKPGVIDGLENTKTIHYGNSDKTTAKEKSVNFDFANVKFPGVGVYRYTVSEVNGNKAGIAYDSQQWTVDVY
VVNREDGGFEAKYIVSTEGGQSDKKPVLFKNFFDTTSLKVTKKVTGNTGEHQRSFSFTLLLTPNECFEKGQVVNI
LQGGETKKVVIGEEYSFTLKDKESVTLSQLPVGIEYKVTEEDVTKDGYKTSATLKDGDVTDGYNLGDSKTTDKST
DEIVVTNKRDTQVPTGVVGTLAPFAVLSIVAIGGVIYITKRKKA

[1051] An E box containing a conserved glutamic residue has been identified in SpyM18_{—}0128. The E-box motif is underlined in SEQ ID NO: 75, below. The conserved glutamic acid (E), at amino acid residue 266, is marked in bold. The E box motif, in particular the conserved glutamic acid residue, is thought to be important for the formation of oligomeric pilus-like structures of SpyM18_{—}0128.

[symbol]

fragments include the E box motif.

SEQ ID NO: 75
MKKNKLLLATAILATALGTASLNQNVKAETAGVIDGSTLVVKKTFPSYTDDKVLMPKADYTFKVEADDNAKGKTK
DGLDIKPGVIDGLENTKTIHYGNSDKTTAKEKSVNFDFANVKFPGVGVYRYTVSEVNGNKAGIAYDSQQWTVDVY
VVNREDGGFEAKYIVSTEGGQSDKKPVLFKNFFDTTSLKVTKKVTGNTGEHQRSFSFTLLLTPNECFEKGQVVNI
LQGGETKKVVIGEEYSFTLKDKESVTLSQLPVGIEYKVTEEDVTKDGYKTSATLKDGDVTDGYNLGDSKTTDKST
DEIVVTNKRDTQVPTGVVGTLAPFAVLSIVAIGGVIYITKRKKA

[1052] SpyM18_{—}0129 is a SrtC2 type sortase. An example of SpyM18_{—}0129 is shown in SEQ ID NO: 76

SEQ ID NO: 76
MISQRMMMTIVQVINKAIDTLILIFCLVVLFLAGFGLWDSYHLYQQADASNFKKFKTAQQQPKFEDLLALNEDVI
GWLNIPGTHMDYPLVQGKTNLEYINKAVDGSVAMSGSLFLDTRNHNDFTDDYSLIYGHHMAGNAMFGEIPKFLKK
DFFNKHNKAIIETKERKKLTVTIFACLKTDAFDQLVFNPNAITNQDQQRQLVDYISKRSKQFKPVKLKHHTKFVA
FSTCENFSTDNRVIVVGTIQE

[1053] SpyM18_{—}0130 is referred to as a hypothetical protein. An example of SpyM18_{—}0130 is shown in SEQ ID NO: 77.

SEQ ID NO: 77
MRKYWKMLFSVVMILTMLAFNQTVLAKDSTVQTSISVENVLERAGDSTSFSVALESIDAMKTIDEITIAGSGKAS
FSPLTFTTVGQYTYRVYQKPSQNKDYQADTTVFDVLVYVTYDEDGTLVAKVISRRAGDEEKSAITFKPKRLVKPI
PPRQPDIPKTPLPLAGEVKSLLGILSIVLLGLLVLLYVKKLKSRL

[1054] SpyM18_{—}0130 contains an amino acid motif indicative of a cell wall anchor: SEQ ID NO: 185 LPLAG (shown in italics in SEQ ID NO: 77, above). In some recombinant host cell systems, it may be preferable to remove this motif to facilitate secretion of a recombinant SpyM18_{—}0130 protein from the host cell. Alternatively, in other recombinant host cell systems, it may be preferable to use the cell wall anchor motif to anchor the recombinantly expressed protein to the cell wall. The extracellular domain of the expressed protein may be cleaved during purification or the recombinant protein may be left attached to either inactivated host cells or cell membranes in the final composition.

[1055] A pilin motif, discussed above, containing a conserved lysine (K) residue has also been identified in SpyM18_{—}0130. The pilin motif sequence is underlined in SEQ ID NO: 77, below. Conserved lysine (K) residues are also marked in bold, at amino acid residues 144, 159, and 169. The pilin sequence, in particular the conserved lysine residues, are thought to be important for the formation of oligomeric, pilus-like structures. Preferred fragments of SpyM18_{—}0130 include at least one conserved lysine residue. Preferably, fragments include the pilin sequence.

SEQ ID NO: 77
MRKYWKMLFSVVMILTMLAFNQTVLAKDSTVQTSISVENVLERAGDSTSFSVALESIDAMKTIDEITIAGSGKAS
FSPLTFTTVGQYTYRVYQKPSQNKDYQADTTVFDVLVYVTYDEDGTLVAKVISRRAGDEEKSAITFKPKRLVKPI
PPRQPDIPKTPLPLAGEVKSLLGILSIVLLGLLVLLYVKKLKSRL

[1056] An E box containing a conserved glutamic residue has been identified in SpyM18_{—}0130. The E-box motif is underlined in SEQ ID NO: 77, below. The conserved glutamic acid (E), at amino acid residue 134, is marked in bold. The E box motif, in particular the conserved glutamic acid residue, is

[symbol]

Preferred fragments of SpyM18_{—}0130 include the conserved glutamic acid residue. Preferably, fragments include the E box motif.

SEQ ID NO: 77
MRKYWKMLFSVVMILTMLAFNQTVLAKDSTVQTSISVENVLERAGDSTSFSVALESIDAMKTIDEITIAGSGKAS
FSPLTFTTVGQYTYRVYQKPSQNKDYQADTTVFDVLVYVTYDEDGTLVAKVISRRAGDEEKSAITFKPKRLVKPI
PPRQPDIPKTPLPLAGEVKSLLGILSIVLLGLLVLLYVKKLKSRL

[1057] SpyM18_{—}0131 is referred to as a putative multiple sugar metabolism regulator. An example of SpyM18_{—}0131 is set forth in SEQ ID NO: 78.

SEQ ID NO: 78
MAIFDLKHVQTLHSLSQLPISVMSQDKALIQVYGNDDYLLCYYQFLKHLAIPQAAQDVIFYEGLFEESFMIFPLC
HYIIAIGPFYPYSLNKDYQEQLANNCLKHSSHRSKEELLSYMALVPHFPINNVRNLLIAIDAFFDTQFETTCQQT
IHQLLQHSKQMTADPDIIHRLKHISKASSQLPPVLEHLNHIMDLVKLGNPQLLKQEINRIPLSSITSSSISALRA
EKNLTVIYLTRLLEFSFVENTDVAKHYSLVKYYMALNEEASDLLKVLRIRCAAIIHFSESLTNKSISDKRQMYNS
VLHYVDSHLYSKLKVSDIAKRLYVSESHLRSVFKKYSNVSLQHYILSTKIKEAQLLLKRGIPVGEVAKSLYFYDT
THFHKIFKKYTGISSKDYLAKYRDNI

[1058] SpyM18_{—}0132 is a F2 like fibronectic-binding protein. An example of SpyM18_{—}0132 is set forth in SEQ ID NO: 79.

SEQ ID NO: 79
MTQKNSYKLSFLLSLTGFILGLLLVFIGLSGVSVGHAETRNGANKQGAFEIKKNKSQEEYNYEVYDNRNILQDGE
HKLEIKRVDGTGKTYQGFCFQLTKNFPTAQGVSKKLYKKLSSSDEETLKQYASKYTSNRRGDTSGNLKKQIAKVL
TEGYPTNKSDWLNGLTENEKIEVTQDAIWYFTETTVPADRSYTNRNVNSQKMKEVYQKLIDTTDIDKYEDVQFDL
FVPQDTNLQAVISVEPVIESLPWTSLKPIAQKDITAKKIWVDAPKEKPIIYFKLYRQLPGEKEVAVDDAELKQIN
SEGQQEISVTWTNQLVTDEKGMAYIYSVKEVDKNGELLEPKDYIKKEDGLTVTNTYVKPTSGHYDIEVTFGNGHI
DITEDTTPDIVSGENQMKQIEGEDSKPIDEVTENNLIEFGKNTMPGEEDGTNSNKYEEVEDSRPVDTLSGLSSEQ
GQSGDMTIEEDSATHIKFSKRDIDGKELAGATMELRDSSGKTISTWISDGQVKDFYLMPGKYTFVETAAPDGYEI
ATAITFTVNEQGQVTVNGKATKGDAHIVMVDAYKPTKGSGQVIDIEEKLPDEQGHSGSTTEIEDSKSSDVIIGGQ
GQIVETTEDTQTGMHGDSGCKTEVEDTKLVQSFHFDNKESESNSEIPKKDKPKSNTSLPATGEKQHNMFFWMVTS
CSLISSVFVISLKTKKRLSSC

[1059] SpyM18_{—}0132 contains an amino acid motif indicative of a cell wall anchor SEQ ID NO: 180 LPATG (shown in italics in SEQ ID NO: 79, above). In some recombinant host cell systems, it may be preferable to remove this motif to facilitate secretion of a recombinant SpyM18_{—}0132 protein from the host cell. Alternatively, in other recombinant host cell systems, it may be preferable to use the cell wall anchor motif to anchor the recombinantly expressed protein to the cell wall. The extracellular domain of the expressed protein may be cleaved during purification or the recombinant protein may be left attached to either inactivated host cells or cell membranes in the final composition.

[1060] A pilin motif, discussed above, containing a conserved lysine (K) residue has also been identified in SpyM18_{—}0132. The pilin motif sequence is underlined in SEQ ID NO: 79, below. A conserved lysine (K) residue is also marked in bold, at amino acid residue 270. The pilin sequence, in particular the conserved lysine residue, is thought to be important for the formation of oligomeric, pilus-like structures. Preferred fragments of SpyM18_{—}0132 include the conserved lysine residue. Preferably, fragments include the pilin sequence.

SEQ ID NO: 79
MTQKNSYKLSFLLSLTGFILGLLLVFIGLSGVSVGHAETRNGANKQGAFEIKKNKSQEEYNYEVYDNRNILQDGE
HKLEIKRVDGTGKTYQGFCFQLTKNFPTAQGVSKKLYKKLSSSDEETLKQYASKYTSNRRGDTSGNLKKQIAKVL
TEGYPTNKSDWLNGLTENEKIEVTQDAIWYFTETTVPADRSYTNRNVNSQKMKEVYQKLIDTTDIDKYEDVQFDL
FVPQDTNLQAVISVEPVIESLPWTSLKPIAQKDITAKKIWVDAPKEKPIIYFKLYRQLPGEKEVAVDDAELKQIN
SEGQQEISVTWTNQLVTDEKGMAYIYSVKEVDKNGELLEPKDYIKKEDGLTVTNTYVKPTSGHYDIEVTFGNGHI
DITEDTTPDIVSGENQMKQIEGEDSKPIDEVTENNLIEFGKNTMPGEEDGTNSNKYEEVEDSRPVDTLSGLSSEQ
GQSGDMTIEEDSATHIKFSKRDIDGKELAGATMELRDSSGKTISTWISDGQVKDFYLMPGKYTFVETAAPDGYEI
ATAITFTVNEQGQVTVNGKATKGDAHIVMVDAYKPTKGSGQVIDIEEKLPDEQGHSGSTTEIEDSKSSDVIIGGQ
GQIVETTEDTQTGMHGDSGCKTEVEDTKLVQSFHFDNKESESNSEIPKKDKPKSNTSLPATGEKQHNMFFWMVTS
CSLISSVFVISLKTKKRLSSC

[1061] An E box containing a conserved glutamic residue has been identified in SpyM18_{—}0132. The E-box motif is underlined in SEQ ID NO: 79, below. The conserved glutamic acid (E), at amino acid residue 516, is marked in bold. The E box motif, in particular the conserved glutamic acid residue, is thought to be important for the formation of oligomeric pilus-like structures of SpyM18_{—}0132. Preferred fragments of SpyM18_{—}0132 include the conserved glutamic acid residue. Preferably, fragments include the E box motif.

SEQ ID NO: 79
MTQKNSYKLSFLLSLTGFILGLLLVFIGLSGVSVGHAETRNGANKQGAFEIKKNKSQEEYNYEVYDNRNILQDGE
HKLEIKRVDGTGKTYQGFCFQLTKNFPTAQGVSKKLYKKLSSSDEETLKQYASKYTSNRRGDTSGNLKKQIAKVL
TEGYPTNKSDWLNGLTENEKIEVTQDAIWYFTETTVPADRSYTNRNVNSQKMKEVYQKLIDTTDIDKYEDVQFDL
FVPQDTNLQAVISVEPVIESLPWTSLKPIAQKDITAKKIWVDAPKEKPIIYFKLYRQLPGEKEVAVDDAELKQIN
SEGQQEISVTWTNQLVTDEKGMAYIYSVKEVDKNGELLEPKDYIKKEDGLTVTNTYVKPTSGHYDIEVTFGNGHI
DITEDTTPDIVSGENQMKQIEGEDSKPIDEVTENNLIEFGKNTMPGEEDGTNSNKYEEVEDSRPVDTLSGLSSEQ
GQSGDMTIEEDSATHIKFSKRDIDGKELAGATMELRDSSGKTISTWISDGQVKDFYLMPGKYTFVETAAPDGYEI
ATAITFTVNEQGQVTVNGKATKGDAHIVMVDAYKPTKGSGQVIDIEEKLPDEQGHSGSTTEIEDSKSSDVIIGGQ
GQIVETTEDTQTGMHGDSGCKTEVEDTKLVQSFHFDNKESESNSEIPKKDKPKSNTSLPATGEKQHNMFFWMVTS
CSLISSVFVISLKTKKRLSSC

[1062] Examples of GAS AI-3 sequences from M49 strain isolate 591 are set forth below.

[1063] SpyoM01000156 is a negative transcriptional regulator (Nra). An example of SpyoM01000156 is set forth in SEQ ID NO: 243.

SEQ ID NO: 243
MPYVKKKKDSFLVETYLEQSIRDKSELVLLLFKSPTIIFSHVAKQTGLTAVQLKYYCKELDDFFGNNLDI
TIKKGKIICCFVKPVKEFYLHQLYDTSTILKLLVFFIKNGTSSQPLIKFSKKYFLSSSSAYRLRESLIKL
LREFGLRVSKNTIVGEEYRIRYLIAMLYSKFGIVIYPLDHLDNQIIYRFLSQSATNLRTSPWLEEPFSFY
NMLLALSWKRHQFAVSIPQTRIFRQLKKLFIYDCLTRSSRQVIENAFSLTFSQGDLDYLFLIYITTNNSF
ASLQWTPQHIETCCHIFEKNDTFRLLLEPILKRLPQLNHSKQDLIKALMYFSKSFLFNLQHFVIEIPSFS
LPTYTGNSNLYKALKNIVNQWLAQLPGKRHLNEKHLQLFCSHIEQILKNKQPALTVVLISSNFINAKLLT
DTIPRYFSDKGIHFYSFYLLRDDIYQIPSLKPDLVITHSRLIPFVKNDLVKGVTVAEFSFDNPDYSIASI
QNLIYQLKDKKYQDFLNEQLQ

[1064] SpyoM01000155 is thought to be a collagen binding protein (CPA). An example of SpyoM01000155 is set forth in SEQ ID NO: 244.

SEQ ID NO: 244
MQKRDKTNYGSANNKRRQTTIGLLKVFLTFVALIGIVGFSIRAFGAEEQSVPNRQSSIQDYPWYGYDSYP
KGYPDYSPLKTYHNLKVNLEGSKDYQAYCFNLTKHFPSKSDSVRSQWYKKLEGTNENFIKLADKPRIEDG
QLQQNILRILYNGYPNNRNGIMKGIDPLNAILVTQNAIWYYTDSAQINPDESFKTEARSNGINDQQLGLM
RKALKELIDPNLGSKYSNKTPSGYRLNVFESHDKTFQNLLSAEYVPDTPPKPGEEPPAKTEKTSVIIRKY
AEGDYSKLLEGATLKLSQIEGSGFQEKDFQSNSLGETVELPNGTYTLTETSSPDGYKIAEPIKFRVENKK
VFIVQKDGSQVENPNKEVAEPYSVEAYNDFMDEEVLSGFTPYGKFYYAKNKDKSSQVVYCFNADLHSPPD
SYDSGETINPDTSTMKEVKYTHTAGSDLFKYALRPRDTNPEDFLKHIKKVIEKGYKKKGDSYNGLTETQF
RAATQLAIYYFTDSADLKTLKTYNNGKGYHGFESMDEKTLAVTKELITYAQNGSAPQLTNLDFFVPNNSK
YQSLIGTEYHPDDLVDVIRMEDKKQEVIPVTHSLTVKKTVVGELGDKTKGFQFELELKDKTGQPIVNTLK
TNNQDLVAKDGKYSFNLKHGDTIRIEGLPTGYSYTLKETEAKDYIVTVDNKVSQEAQSVGKDITEDKKVT
FENRKDLVPPTGLTTDGAIYLWLLLLVPLGLLVWLFGRKGLKND

[1065] SpyoM01000155 contains an amino acid motif indicative of a cell wall anchor: SEQ ID NO: 184 VPPTG (shown in italics in SEQ ID NO: 244, above). In some recombinant host cell systems, it may be preferable to remove this motif to facilitate secretion of a recombinant SpyoM01000155 protein from the host cell. Alternatively, in other recombinant host cell systems, it may be preferable to use the cell wall anchor motif to anchor the recombinantly expressed protein to the cell wall. The extracellular domain of the expressed protein may be cleaved during purification or the recombinant protein may be left attached to either inactivated host cells or cell membranes in the final composition.

[1066] Two pilin motifs, discussed above, containing conserved lysine (K) residues have also been identified in SpyoM01060155. The pilin motif sequence is underlined in SEQ ID NO: 244, below. Conserved lysine (K) residues are also marked in bold, at amino acid residues 71 and 261. The pilin sequences, in particular the conserved lysine residues, are thought to be important for the formation of oligomeric, pilus-like structures. Preferred fragments of SpyoM01000155 include at least one conserved lysine residue. Preferably, fragments include at least one pilin sequence.

SEQ ID NO: 244
MQKRDKTNYGSANNKRRQTTIGLLKVFLTFVALIGIVGFSIRAFGAEEQSVPNRQSSIQDYPWYGYDSYP
KGYPDYSPLKTYHNLKVNLEGSKDYQAYCFNLTKHFPSKSDSVRSQWYKKLEGTNENFIKLADKPRIEDG
QLQQNILRILYNGYPNNRNGIMKGIDPLNAILVTQNAIWYYTDSAQINPDESFKTEARSNGINDQQLGLM
RKALKELIDPNLGSKYSNKTPSGYRLNVFESHDKTFQNLLSAEYVPDTPPKPGEEPPAKTEKTSVIIRKY
AEGDYSKLLEGATLKLSQIEGSGFQEKDFQSNSLGETVELPNGTYTLTETSSPDGYKIAEPIKFRVENKK
VFIVQKDGSQVENPNKEVAEPYSVEAYNDFMDEEVLSGFTPYGKFYYAKNKDKSSQVVYCFNADLHSPPD
SYDSGETINPDTSTMKEVKYTHTAGSDLFKYALRPRDTNPEDFLKHIKKVIEKGYKKKGDSYNGLTETQF
RAATQLAIYYFTDSADLKTLKTYNNGKGYHGFESMDEKTLAVTKELITYAQNGSAPQLTNLDFFVPNNSK
YQSLIGTEYHPDDLVDVIRMEDKKQEVIPVTHSLTVKKTVVGELGDKTKGFQFELELKDKTGQPIVNTLK
TNNQDLVAKDGKYSFNLKHGDTIRIEGLPTGYSYTLKETEAKDYIVTVDNKVSQEAQSVGKDITEDKKVT
FENRKDLVPPTGLTTDGAIYLWLLLLVPLGLLVWLFGRKGLKND

[1067] Two E boxes containing conserved glutamic residues have been identified in SpyoM01000155. The E-box motifs are underlined in SEQ ID NO: 244, below. The conserved glutamic acid (E) residues, at amino acid residues 329 and 668, are marked in bold. The E box motifs, in particular the conserved glutamic acid residues, are thought to be important for the formation of oligomeric pilus-like structures of SpyoM01000155. Preferred fragments of SpyoM01000155 include at least one conserved glutamic acid residue. Preferably, fragments include at least one E box motif.

SEQ ID NO: 244
MQKRDKTNYGSANNKRRQTTIGLLKVFLTFVALIGIVGFSIRAFGAEEQSVPNRQSSIQDYPWYGYDSYP
KGYPDYSPLKTYHNLKVNLEGSKDYQAYCFNLTKHFPSKSDSVRSQWYKKLEGTNENFIKLADKPRIEDG
QLQQNILRILYNGYPNNRNGIMKGIDPLNAILVTQNAIWYYTDSAQINPDESFKTEARSNGINDQQLGLM
RKALKELIDPNLGSKYSNKTPSGYRLNVFESHDKTFQNLLSAEYVPDTPPKPGEEPPAKTEKTSVIIRKY
AEGDYSKLLEGATLKLSQIEGSGFQEKDFQSNSLGETVELPNGTYTLTETSSPDGYKIAEPIKFRVENKK
VFIVQKDGSQVENPNKEVAEPYSVEAYNDFMDEEVLSGFTPYGKFYYAKNKDKSSQVVYCFNADLHSPPD
SYDSGETINPDTSTMKEVKYTHTAGSDLFKYALRPRDTNPEDFLKHIKKVIEKGYKKKGDSYNGLTETQF
RAATQLAIYYFTDSADLKDLKTYNNGKGYHGFESMDEKTLAVTKELITYAQNGSAPQLTNLDFFVPNNSK
YQSLIGTEYHPDDLVDVIRMEDKKQEVIPVTHSLTVKKTVVGELGDKTKGFQFELELKDKTGQPIVNTLK
TNNQDLVAKDGKYSFNLKHGDTIRIEGLPTGYSYTLKETEAKDYIVTVDNKVSQEAQSVGKDITEDKKVT
FENRKDLVPPTGLTTDGAIYLWLLLLVPLGLLVWLFGRKGLKND

[1068] SpyoM01000154 is a LepA protein. An example of SpyoM01000154 is shown in SEQ ID NO: 245.

SEQ ID NO: 245
MTNYLNRLNENSLFKAFIRLVLKISIIGFLGYILFQYVFGVMIINTNDMSPALSAGDGVLYYRLADRSHI
NDVVVYEVDNTLKVGRIAAQAGDEVNFTQEGGLLINGHPPEKEVPYLTYPHSSGPNFPYKVPTGTYFILN
DYREERLDSRYYGALPINQIKGKISTLLRVRGI

[1069] SpyoM01000153 is thought to be a fimbrial protein. An example of SpyoM01000153 is shown in SEQ ID NO: 246.

SEQ ID NO: 246
MKKNKLLLATAILATALGMASMSQNIKAETAGVIDGSTLVVKKTFPSYTDDNVLMPKADYSFKVEADDNA
KGKTKDGLDIKPGVIDGLENTKTIRYSNSDKITAKEKSVNFEFANVKFPGVGVYRYTVAEVNGNKAGITY
DSQQWTVDVYVVNKEGGGFEVKYIVSTEVGQSEKKPVLFKNSFDTTSLKIEKQVTGNTGEHQRLFSFTLL
LTPNECFEKGQVVNILQGGETKKVVIGEEYSFTLKDKESVTLSQLPVGIEYKLTEEDVTKDGYKTSATLK
DGEQSSTYELGKDHKTDKSADEIVVTNKRDTQVPTGVVGTLAPFAVLSIVAIGGVIYITKRKKA

[1070] SpyoM01000153 contains an amino acid motif indicative of a cell wall anchor: SEQ ID NO: 140 QVPTG (shown in italics in SEQ ID NO: 246, above). In some recombinant host cell systems, it may be preferable to remove this motif to facilitate secretion of a recombinant SpyoM01000153 protein from the host cell. Alternatively, in other recombinant host cell systems, it may be preferable to use the cell wall anchor motif to anchor the recombinantly expressed protein to the cell wall. The extracellular domain of the expressed protein may be cleaved during purification or the recombinant protein may be left attached to either inactivated host cells or cell membranes in the final composition.

[1071] A pilin motif, discussed above, containing a conserved lysine (K) residue has also been identified in SpyoM01000153. The pilin motif sequence is underlined in SEQ ID NO: 246, below. A conserved lysine (K) residue is also marked in bold, at amino acid residue 57. The pilin sequence, in particular the conserved lysine residue, is thought to be important for the formation of oligomeric, pilus-like structures. Preferred fragments of SpyoM01000153 include the conserved lysine residue. Preferably, fragments include the pilin sequence.

SEQ ID NO: 246
MKKNKLLLATAILATALGMASMSQNIKAETAGVIDGSTLVVKKTFPSYTDDNVLMPKADYSFKVEADDNA
KGKTKDGLDIKPGVIDGLENTKTIRYSNSDKITAKEKSVNFEFANVKFPGVGVYRYTVAEVNGNKAGITY
DSQQWTVDVYVVNKEGGGFEVKYIVSTEVGQSEKKPVLFKNSFDTTSLKIEKQVTGNTGEHQRLFSFTLL
LTPNECFEKGQVVNILQGGETKKVVIGEEYSFTLKDKESVTLSQLPVGIEYKLTEEDVTKDGYKTSATLK
DGEQSSTYELGKDHKTDKSADEIVVTNKRDTQVPTGVVGTLAPFAVLSIVAIGGVIYITKRKKA

[1072] An E box containing a conserved glutamic residue has been identified in SpyoM01000153. The E-box motif is underlined in SEQ ID NO: 246, below. The conserved glutamic acid (E), at amino acid residue 265, is marked in bold. The E box motif, in particular the conserved glutamic acid residue, is thought to be important for the formation of oligomeric pilus-like structures of SpyoM01000153. Preferred fragments of SpyoM01000153 include the conserved glutamic acid residue. Preferably, fragments include the E box motif.

SEQ ID NO: 246
MKKNKLLLATAILATALGMASMSQNIKAETAGVIDGSTLVVKKTFPSYTDDNVLMPKADYSFKVEADDNA
KGKTKDGLDIKPGVIDGLENTKTIRYSNSDKITAKEKSVNFEFANVKFPGVGVYRYTVAEVNGNKAGITY
DSQQWTVDVYVVNKEGGGFEVKYIVSTEVGQSEKKPVLFKNSFDTTSLKIEKQVTGNTGEHQRLFSFTLL
LTPNECFEKGQVVNILQGGETKKVVIGEEYSFTLKDKESVTLSQLPVGIEYKLTEEDVTKDGYKTSATLK
DGEQSSTYELGKDHKTDKSADEIVVTNKRDTQVPTGVVGTLAPFAVLSIVAIGGVIYITKRKKA

[1073] SpyoM01000152 is a SrtC2 type sortase. An example of SpyoM01000152 is shown in SEQ ID NO: 247

SEQ ID NO: 247
MMMTIVQVINKAIDTLILIFCLVVLFLAGFGLWDSYHLYQQADASNFKKFKTAQQQPKFEDLLALNEDVI
GWLNIPGTHIDYPLVQGKTNLEYINKAVDGSVAMSGSLFLDTRNHNDFTDDYSLIYGHHMAGNAMFGEIP
KFLKKNFFNKHNKAIIETKERKKLTVTIFACLKTDAFDQLVFNPNAITNQDQQRQLVDYISKRSKQFKPV
KLKHHTKFVAFSTCENFSTDNRVIVVGTIQE

[1074] SpyoM01000151 is referred to as a hypothetical protein. An example of SpyoM01000151 is shown in SEQ ID NO: 248.

SEQ ID NO: 248
MLFSVVMMLTMLAFNQTVLAKDSTVQTSISVENVLERAGDSTPFSIALESIDAMKTIEEITIAGSGKASF
SPLTFTTVGQYTYRVYQKPSQNKDYQADTTVFDVLVYVTYDEDGTLVAKVISRRAGDEEKSAITFKPKRL
VKPIPPRQPDIPKTPLPLAGEVKSLLGILSIVLLGLLVLLYVKKLKSRL

[1075] SpyoM01000151 contains an amino acid motif indicative of a cell wall anchor: SEQ ID NO: 185 LPLAG (shown in italics in SEQ ID NO: 248, above). In some recombinant host cell systems, it may be preferable to remove this motif to facilitate secretion of a recombinant SpyoM01000151 protein from the host cell. Alternatively, in other recombinant host cell systems, it may be preferable to use the cell wall anchor motif to anchor the recombinantly expressed protein to the cell wall. The extracellular domain of the expressed protein may be cleaved during purification or the recombinant protein may be left attached to either inactivated host cells or cell membranes in the final composition.

[1076] A pilin motif, discussed above, containing a conserved lysine (K) residue has also been identified in SpyoM01000151. The pilin motif sequence is underlined in SEQ ID NO: 248, below. Conserved lysine (K) residues are also marked in bold, at amino acid residue 138. The pilin sequence, in particular the conserved lysine residue, is thought to be important for the formation of oligomeric, pilus-like structures. Preferred fragments of SpyoM01000151 include the conserved lysine residue. Preferably, fragments include the pilin sequence.

SEQ ID NO: 248

MLFSVVMMLTMLAFNQTVLAKDSTVQTSISVENVLERAGDSTPFSIALES
IDAMKTIEEITIAGSGKASFSPLTFTTVGQYTYRVYQKPSQNKDYQADTT
VFDVLVYVTYDEDGTLVAKVISRRAGDEEKSAITFKPKRLVKPIPPRQPD
IPKTPLPLAGEVKSLLGILSIVLLGLLVLLYVKKLKSRL

[1077] Two E boxes containing conserved glutamic residues have been identified in SpyoM01000151. The E-box motifs are underlined in SEQ ID NO: 248, below. The conserved glutamic acid (E) residues, at amino acid residues 58 and 128, are marked in bold. The E box motifs, in particular the conserved glutamic acid residues, are thought to be important for the formation of

[symbol]

at least one conserved glutamic acid residue. Preferably, fragments include at least one E box motif.

SEQ ID NO: 248

MLFSVVMMLTMLAFNQTVLAKDSTVQTSISVENVLERAGDSTPFSIALES
IDAMKTIEEITIAGSGKASFSPLTFTTVGQYTYRVYQKPSQNKDYQADTT
VFDVLVYVTYDEDGTLVAKVISRRAGDEEKSAITFKPKRLVKPIPPRQPD
IPKTPLPLAGEVKSLLGILSIVLLGLLVLLYVKKLKSRL

[1078] SpyoM01000150 is referred to as a putative MsmRL. An example of SpyoM01000150 is set forth in SEQ ID NO: 249.

SEQ ID NO: 249

MVIFDLKHVQTLHSLSQLPISVMSQDKALIQVYGNDDYLLCYYQFLKHLA
IPQAAQDVIFYEGLFEESFMIFPLCHYIIAIGPFYPYSLNKDYQEQLANN
FLKHSSHRSKEELLSYMALVPHFPINNVRNLLIAIDAFFDTQFETTCQQT
IHQLLQHSKQMTADPDIIHRLKHISKASSQLPPVLEHLNHIMDLVKLGNP
QLLKQEINRIPLSSITSSSISALRAEKNLTVIYLTRLLEFSFVENTDVAK
HYSLVKYYMALNEEASDLLKVLRIRCAAIIHFSESLTNKSISDKRQMYNS
VLHYVDSHLYSKLKVSDIAKRLYVSESHLRSVFKKYSNVSLQHYILSTKI
KEAQLLLKRGIPVGEVAKSLYFYDTTHFHKIFKKYTGISSKDYLAKYRD
NI

[1079] SpyoM01000149 is a F2 like fibronectin-binding protein. An example of SpyoM01000149 is set forth in SEQ ID NO: 250.

SEQ ID NO: 250

MTQKNSYKLSFLLSLTGFILGLLLVFIGLSGVSVGHAETRNGANKQGYFE
IKKVDQNNKPLSGATFSLTPKDGKGKPVQTFTSSEEGIIDAQNLQPGTYT
LKEETAPDGYDKTSRTWTVTVYENGYTKLVENPYNGEIISKAGSKDVSSS
LQLENPKMSVVSKYGEQEKTSNSADFYRNHAAYFKMSFELKQKDKSETIN
PGDTFVLQLDRRLNPKGISQDIPKIIYDSENSPLAIGKYDAKTHQLTYTF
TNYIAGLDKVQLSAELSLFLENKEVLENTNISDFKSTIGGQEITYKGTVN
VLYGNESTKESNYITNGLSNVGGSIESYNTETGEFVWYVYVNPNRTNIPY
AVLNLWGFAKRTAQGENDNSSVSSAQLTGYDIYEVPHNYRLPTSYGVDIS
RLNLRKDLEAKLPQGSTQGANKRLRIDFGENLQGKAFVVKVTGKADQSGK
ELIVQSHLSSFNNWGSYKTLRPNSHVSFTNEIALSPSKGSGSGTSEFTKP
AITVANLKRVAQLRFKKVSTDNVPLPEAAFELRSSNGNSQKLEASSNTQG
EIHFKDLTSGTYDLYETKAPKGYQQVTEKLATVTVDTTKPAEQMVKWEKP
HSFVKVEANKEVTIVNHKETLTFSGKKIWENDRPDQRPAKIQVQLLQNGQ
KMPNQIQEVTKDNDWSYHFKDLPKYDAKNQEYKYSVEEVKVPDGYKVSYL
GNDIFNTRETEFVFEQNNFNLEFGNAEIKGQSGSKIIDEDTLTSFKGKKI
WKNDTAENRPQAIQVQLYADGVAVEGQTKFISGSGNEWSFEFKNLKKYNG
TGNDIIYSVKEVTVPTGYDVTYSANDIINTKREVITQQGPNLEIEETLPL
ESGASGGTTTVEDSRSVDTLSGLSSEQGQSGDMTIEEDSATHIKFSKRDI
DGKELAGATMELRDSSGKTISTWISDGQVKDFYLMPGKYTFVETAAPDGY
EIATAITFTVNEQGQVTVNGKATKGDAHIVMVDAYKPTKGSGQVIDIEEK
LPDEQGHSGSTTEIEDSKPSDVIIGGQGEVVDTTEDTQSGMTGHSGSTTE
IEDSKSSDVIIGGQGQVVETTEDTQTGMHGDSGCKTEVEDTKLVQFFHFD
NKEPESNSEIPKKDKPKSNTSLPATGEKQHNKFFWMVTSCSLISSVFVIS
LKSKKRLLSC

[1080] SpyoM01000149 contains an amino acid motif indicative of a cell wall anchor: SEQ ID NO: 180 LPATG (shown in italics in SEQ ID NO: 250, above). In some recombinant host cell systems, it may be preferable to remove this motif to facilitate secretion of a recombinant SpyoM01000149 protein from the host cell. Alternatively, in other recombinant host cell systems, it may be preferable to use the cell wall anchor motif to anchor the recombinantly expressed protein to the cell wall. The extracellular domain of the expressed protein may be cleaved during purification or the recombinant protein may be left attached to either inactivated host cells or cell membranes in the final composition.

[1081] Two pilin motifs, discussed above, containing conserved lysine (K) residues have also been identified in SpyoM01000149. The pilin motif sequences are underlined in SEQ ID NO: 250, below. Conserved lysine (K) residues are also marked in bold, at amino acid residues 157 and 163, and 216 and 224. The pilin sequences, in particular the conserved lysine residues, are thought to be important

[symbol]

include at least one conserved lysine residue. Preferably, fragments include at least one pilin sequence.

SEQ ID NO: 250

MTQKNSYKLSFLLSLTGFILGLLLVFIGLSGVSVGHAETRNGANKQGYFE
IKKVDQNNKPLSGATFSLTPKDGKGKPVQTFTSSEEGIIDAQNLQPGTYT
LKEETAPDGYDKTSRTWTVTVYENGYTKLVENPYNGEIISKAGSKDVSSS
LQLENPKMSVVSKYGEQEKTSNSADFYRNHAAYFKMSFELKQKDKSETIN
PGDTFVLQLDRRLNPKGISQDIPKIIYDSENSPLAIGKYDAKTHQLTYTF
TNYIAGLDKVQLSAELSLFLENKEVLENTNISDFKSTIGGQEITYKGTVN
VLYGNESTKESNYITNGLSNVGGSIESYNTETGEFVWYVYVNPNRTNIPY
AVLNLWGFAKRTAQGENDNSSVSSAQLTGYDIYEVPHNYRLPTSYGVDIS
RLNLRKDLEAKLPQGSTQGANKRLRIDFGENLQGKAFVVKVTGKADQSGK
ELIVQSHLSSFNNWGSYKTLRPNSHVSFTNEIALSPSKGSGSGTSEFTKP
AITVANLKRVAQLRFKKVSTDNVPLPEAAFELRSSNGNSQKLEASSNTQG
EIHFKDLTSGTYDLYETKAPKGYQQVTEKLATVTVDTTKPAEQMVKWEKP
HSFVKVEANKEVTIVNHKETLTFSGKKIWENDRPDQRPAKIQVQLLQNGQ
KMPNQIQEVTKDNDWSYHFKDLPKYDAKNQEYKYSVEEVKVPDGYKVSYL
GNDIFNTRETEFVFEQNNFNLEFGNAEIKGQSGSKIIDEDTLTSFKGKKI
WKNDTAENRPQAIQVQLYADGVAVEGQTKFISGSGNEWSFEFKNLKKYNG
TGNDIIYSVKEVTVPTGYDVTYSANDIINTKREVITQQGPNLEIEETLPL
ESGASGGTTTVEDSRSVDTLSGLSSEQGQSGDMTIEEDSATHIKFSKRDI
DGKELAGATMELRDSSGKTISTWISDGQVKDFYLMPGKYTFVETAAPDGY
EIATAITFTVNEQGQVTVNGKATKGDAHIVMVDAYKPTKGSGQVIDIEEK
LPDEQGHSGSTTEIEDSKPSDVIIGGQGEVVDTTEDTQSGMTGHSGSTTE
IEDSKSSDVIIGGQGQVVETTEDTQTGMHGDSGCKTEVEDTKLVQFFHFD
NKEPESNSEIPKKDKPKSNTSLPATGEKQHNKFFWMVTSCSLISSVFVIS
LKSKKRLLSC

[1082] Two E boxes containing conserved glutamic residues have been identified in SpyoM01000149. The E-box motifs are underlined in SEQ ID NO: 250, below. The conserved glutamic acid (E) residues, at amino acid residues 329 and 668, are marked in bold. The E box motifs, in particular the conserved glutamic acid residues, are thought to be important for the formation of oligomeric pilus-like structures of SpyoM01000149. Preferred fragments of SpyoM01000149 include at least one conserved glutamic acid residue. Preferably, fragments include at least one E box motif.

SEQ ID NO: 250

MTQKNSYKLSFLLSLTGFILGLLLVFIGLSGVSVGHAETRNGANKQGYFE
IKKVDQNNKPLSGATFSLTPKDGKGKPVQTFTSSEEGIIDAQNLQPGTYT
LKEETAPDGYDKTSRTWTVTVYENGYTKLVENPYNGEIISKAGSKDVSSS
LQLENPKMSVVSKYGEQEKTSNSADFYRNHAAYFKMSFELKQKDKSETIN
PGDTFVLQLDRRLNPKGISQDIPKIIYDSENSPLAIGKYDAKTHQLTYTF
TNYIAGLDKVQLSAELSLFLENKEVLENTNISDFKSTIGGQEITYKGTVN
VLYGNESTKESNYITNGLSNVGGSIESYNTETGEFVWYVYVNPNRTNIPY
AVLNLWGFAKRTAQGENDNSSVSSAQLTGYDIYEVPHNYRLPTSYGVDIS
RLNLRKDLEAKLPQGSTQGANKRLRIDFGENLQGKAFVVKVTGKADQSGK
ELIVQSHLSSFNNWGSYKTLRPNSHVSFTNEIALSPSKGSGSGTSEFTKP
AITVANLKRVAQLRFKKVSTDNVPLPEAAFELRSSNGNSQKLEASSNTQG
EIHFKDLTSGTYDLYETKAPKGYQQVTEKLATVTVDTTKPAEQMVKWEKP
HSFVKVEANKEVTIVNHKETLTFSGKKIWENDRPDQRPAKIQVQLLQNGQ
KMPNQIQEVTKDNDWSYHFKDLPKYDAKNQEYKYSVEEVKVPDGYKVSYL
GNDIFNTRETEFVFEQNNFNLEFGNAEIKGQSGSKIIDEDTLTSFKGKKI
WKNDTAENRPQAIQVQLYADGVAVEGQTKFISGSGNEWSFEFKNLKKYNG
TGNDIIYSVKEVTVPTGYDVTYSANDIINTKREVITQQGPNLEIEETLPL
ESGASGGTTTVEDSRSVDTLSGLSSEQGQSGDMTIEEDSATHIKFSKRDI
DGKELAGATMELRDSSGKTISTWISDGQVKDFYLMPGKYTFVETAAPDGY
EIATAITFTVNEQGQVTVNGKATKGDAHIVMVDAYKPTKGSGQVIDIEEK
LPDEQGHSGSTTEIEDSKPSDVIIGGQGEVVDTTEDTQSGMTGHSGSTTE
IEDSKSSDVIIGGQGQVVETTEDTQTGMHGDSGCKTEVEDTKLVQFFHFD
NKEPESNSEIPKKDKPKSNTSLPATGEKQHNKFFWMVTSCSLISSVFVIS
LKSKKRLLSC

[1083] As discussed above, applicants have also determined the nucleotide and encoded amino acid sequence of fimbrial structural subunits in several other GAS AI-3 strains of bacteria. Examples of sequences of these fimbrial structural subunits are set forth below.

[1084] M3 strain isolate ISS 3040 is a GAS AI-3 strain of bacteria. ISS3040_fimbrial is thought to be a fimbrial structural subunit of M3 strain isolate ISS 3040. An example of a nucleotide sequence

[symbol]

acid sequence (SEQ ID NO: 264) are set forth below.

SEQ ID NO: 263

gagacggcaggagtgtccgaaaatgcaaaattaatagtaaaaaagacatt
tgactcttatacagacaatgaagttttaatgccaaaagctgattatactt
ttaaagtagaggcagatagtacagctagtggcaaaacgaaagacggttta
gagattaagccaggtattgttaatggtttaacagaacagattatcagcta
tactaatactgataaaccagatagtaaagttaaaagtacagagtttgatt
tttcaaaagtagtattccctggtattggtgtttaccgctatactgtttca
gaaaaacaaggtgatgttgaaggaattacctacgatactaagaagtggac
agtagatgtttatgttggaaacaaagaaggtggtggttttgaacctaagt
ttattgtatctaaggaacaaggaacagacgtcaaaaaaccagttaatttt
aacaactcgtttgcaactacttcgttaaaagttaagaagaatgtatcggg
gaatactggagaattgcaaaaagaatttgactttacattgacgcttaatg
aaagcacgaattttaaaaaagatcaaattgtttctttacaaaaaggaaac
gagaaatttgaagttaagattggtactccctacaagtttaaactcaaaaa
tggggaatctattcaactagacaagttaccagttggtattacttataaag
tcaatgaaatggaagctaataaagatgggtataaaacaacagcatccttg
aaagagggagatggtcaatctaaaatgtatcaattggatatggaacaaaa
aacagacgaatctgctgacgaaatcgttgtcacaaataagcgtgacactc
aagttccaactggtgttgtaggcacccttgctccatttgcagttcttagc

SEQ ID NO: 264

ETAGVSENAKLIVKKTFDSYTDNEVLMPKADYTFKVEADSTASG
KTKDGLEIKPGIVNGLTEQIISYTNTDKPDSKVKSTEFDFSKVVFPGIGV
YRYTVSEKQGDVEGITYDTKKWTVDVYVGNKEGGGFEPKFIVSKEQGTDV
KKPVNFNNSFATTSLKVKKNVSGNTGELQKEFDFTLTLNESTNFKKDQIV
SLQKGNEKFEVKIGTPYKFKLKNGESIQLDKLPVGITYKVNEMEANKDGY
KTTASLKEGDGQSKMYQLDMEQKTDESADEIVVTNKRDTQVPTGVVGTLA
PFAVLS

[1085] M44 strain isolate ISS 3776 is a GAS AI-3 strain of bacteria. ISS3776_fimbrial is thought to be a fimbrial structural subunit of M44 isolate ISS 3776. An example of a nucleotide sequence encoding the ISS3776_fimbrial protein (SEQ ID NO: 253) and an ISS3776_fimbrial protein amino acid sequence (SEQ ID NO: 254) are set forth below.

SEQ ID NO: 253

ttggagagagaaaaaatgaaaaaaaacaaattattacttgctactgcaat
cttagcaactgctttaggaacagcttctttaaatcaaaacgtaaaagctg
agacggcaggggttgtaacaggaaaatcactacaagttacaaagacaatg
acttatgatgatgaagaggtgttaatgcccgaaaccgcctttacttttac
tatagagcctgatatgactgcaagtggaaaagaaggcagcctagatatta
aaaatggaattgtagaaggcttagacaaacaagtaacagtaaaatataag
aatacagataaaacatctcaaaaaactaaaatagcacaatttgatttttc
taaggttaaatttccagctataggtgtttaccgctatatggtttcagaga
aaaacgataaaaaagacggaattacgtacgatgataaaaagtggactgta
gatgtttatgttgggaataaggccaataacgaagaaggtttcgaagttct
atatattgtatcaaaagaaggtacttctagtactaaaaaaccaattgaat
ttacaaactctattaaaactacttccttaaaaattgaaaaacaaataact
ggcaatgcaggagatcgtaaaaaatcattcaacttcacattaacattaca
accaagtgaatattataaaactggatcagttgtgaaaatcgaacaggatg
gaagtaaaaaagatgtgacgataggaacgccttacaaatttactttggga
cacggtaagagtgtcatgttatcgaaattaccaattggtatcaattacta
tcttagtgaagacgaagcgaataaagacggctacactacaacggcaacat
taaaagaacaaggcaaagaaaagagttccgatttcactttgagtactcaa
aaccagaaaacagacgaatctgctgacgaaatcgttgtcacaaataagcg
tgacactcaagttccaactggtgttgtagggacccttgctccatttgcag
ttcttagcattgtggctattggtggagttatctatattacaaaacgtaaa
aaagcttaa

SEQ ID NO: 254

MEREKMKKNKLLLATAILATALGTASLNQNVKAETAGVVTGKSL
QVTKTMTYDDEEVLMPETAFTFTIEPDMTASGKEGSLDIKNGIVEGLDKQ
VTVKYKNTDKTSQKTKIAQFDFSKVKFPAIGVYRYMVSEKNDKKDGITYD
DKKWTVDVYVGNKANNEEGFEVLYIVSKEGTSSTKKPIEFTNSIKTTSLK
IEKQITGNAGDRKKSFNFTLTLQPSEYYKTGSVVKIEQDGSKKDVTIGTP
YKFTLGHGKSVMLSKLPIGINYYLSEDEANKDGYTTTATLKEQGKEKSSD
FTLSTQNQKTDESADEIVVTNKRDTQVPTGVVGTLAPFAVLSIVAIGGVI
YITKRKKA

[1086] M77 strain isolate ISS4959 is a GAS AI-3 strain of bacteria. ISS4959_fimbrial is thought to be a fimbrial structural subunit of M77 strain ISS 4959. An example of a nucleotide sequence encoding the ISS4959_fimbrial protein (SEQ ID NO: 271) and an ISS4959_fimbrial protein amino acid sequence (SEQ ID NO: 272) are set forth below.

SEQ ID NO: 271

gtaacagtaaaatataagaatacagataaaacatctcaaaaaactaaaat
agcacaatttgatttttctaaggttaaatttccagctataggtgtttacc
gctatatggtttcagagaaaaacgataaaaaagacggaattacgtacgat
gataaaaagtggacngtagatgtttatgttgggaataaggccaataacga
agaaggtttcgaagttctatatattgtatcaaaagaaggtacttctagtn
ctaaaaaaccaattgaatttacaaactctattaaaactacttccttaaaa
attgaaaaacaaataactggcaatgcaggagatcgtaaaaaatcattcaa
cttcacattnacattacanccaagtgaatattataaaactggatcagttg
tgaaaatcgaacaggatggaagtaaaaaagatgtgacgataggaacgcct
tacaaatttactttgggacacggtaagagtgtcatgttatcgaaattncc
aattggtatcaattactatcttagtgaagacgaagcgaataaagacggnt
acactacancggcaacattaaaagaacaaggcaaagaaaagagttccgat
ttcactttgagtactcaaaaccagaaaacagacgaatctgctg

SEQ ID NO: 272

VTVKYKNTDKTSQKTKIAQFDFSKVKFPAIGVYRYMVSEKNDKK
DGITYDDKKWTVDVYVGNKANNEEGFEVLYIVSKEGTSSXKKPIEFTNSI
KTTSLKIEKQITGNAGDRKKSFNFTXTLXPSEYYKTGSVVKIEQDGSKKD
VTIGTPYKFTLGHGKSVMLSKXPIGINYYLSEDEANKDGYTTXATLKEQG
KEKSSDFTLSTQNQKTDESA

[1087] Examples of GAS AI-4 sequences from M12 strain isolate A735 are set forth below.

[1088] 19224133 is thought to be a RofA regulatory protein. An example of a nucleotide sequence encoding the RofA regulatory protein (SEQ ID NO: 104) and a RofA regulatory protein amino acid sequence (SEQ ID NO: 105) are set forth below.

SEQ ID NO: 104

ATGACCATCCAAAAAAGGATGATATCTTGCCAATTTACACATCCTTCTAA
AGAAACTTATCTTTACCAACTCTATGCATCATCTAATGTCTTACAATTAC
TAGCGTTTTTAATAAAAAATGGTTCCCACTCTCGTCCCCTTACGGATTTT
GCAAGAAGTCATTTTTTATCAAACTCCTCAGCTTATCGGATGCGCGAAGC
ATTGATTCCTTTATTAAGAAACTTTGAATTAAAACTCTCTAAGAACAAGA
TTGTCGGTGAGGAATATCGTATCCGTTACCTCATCGCTCTGCTATATAGT
AAGTTTGGCATTAAAGTTTATGACTTGACGCAGCAAGACAAAAACATTAT
TCATAGCTTTTTATCCCATAGTTCCACCCACCTTAAAACTTCTCCTTGGT
TATCGGAATCGTTTTCTTTCTATGACATTTTATTAGCTTTATCGTGGAAG
CGGCATCAATTTTCGGTAACTATTCCCCAAACCAGAATTTTTCAACAATT
AAAAAAACTTTTTGTCTACGATTCTTTGAAAAAAAGTAGCCGTGATATTA
TCGAAACTTACTGCCAACTAAACTTTTCAGCAGGAGATTTGGACTACCTC
TATTTAATTTATATCACCGCTAATAATTCTTTTGCGAGCTTACAATGGAC
ACCTGAGCATATCAGACAATGTTGTCAACTTTTTGAAGAAAATGATACTT
TTCGCCTGCTTTTAAATCCTATCATCACTCTTTTACCTAACCTAAAAGAG
CAAAAGGCTAGTTTAGTAAAAGCTCTTATGTTTTTTTCAAAATCATTCTT
GTTTAATCTGCAACATTTTATTCCTGAGACCAACTTATTCGTTTCTCCGT
ACTATAAAGGAAACCAAAAACTCTATACGTCCTTAAAGTTAATTGTCGAA
GAGTGGATGGCCAAACTTCCTGGTAAGCGTTACTTGAACCATAAGCATTT
TCATCTTTTTTGCCACTATGTCGAGCAAATTCTAAGAAATATCCAACCTC
CTTTAGTTGTTGTTTTCGTAGCCAGTAATTTTATCAATGCTCATCTCCTA
ACAGATTCTTTCCCAAGGTATTTCTCGGATAAAAGCATTGATTTTCATTC
CTATTATCTATTGCAAGATAATGTTTATCAAATTCCTGATTTAAAGCCAG
ATTTGGTCATCACTCACAGTCAACTGATTCCTTTTGTTCACCATGAACTT
ACAAAAGGAATTGCTGTTGCTGAAATATCTTTTGATGAATCGATTCTGTC
TATCCAAGAATTGATGTATCAAGTTAAAGAGGAAAAATTCCAAGCTGATT
TAACCAAACAATTAACATAA

SEQ ID NO: 105

MTIQKRMISCQFTHPSKETYLYQLYASSNVLQLLAFLIKNGSHSRPLTDF
ARSHFLSNSSAYRMREALIPLLRNFELKLSKNKIVGEEYRIRYLIALLYS
KFGIKVYDLTQQDKNIIHSFLSHSSTHLKTSPWLSESFSFYDILLALSWK
RHQFSVTIPQTRIFQQLKKLFVYDSLKKSSRDIIETYCQLNFSAGDLDYL
YLIYITANNSFASLQWTPEHIRQCCQLFEENDTFRLLLNPIITLLPNLKE
QKASLVKALMFFSKSFLFNLQHFIPETNLFVSPYYKGNQKLYTSLKLIVE
EWMAKLPGKRYLNHKHFTLFCHYVEQTLPNTQPPLVVVFVASNFINAHLL
TDSFPRYFSDKSIDFHSYYLLQDNVYQIPDLKPDLVITHSQLIPFVHHEL
TKGIAVAEISFDESILSIQELMYQVKEEKFQADLTKQLT

[1089] 19224134 is thought to be a protein F fibronectin binding protein. An example of a nucleotide sequence encoding the protein F fibronectin binding protein (SEQ ID NO: 106) and a protein F fibronectin binding protein amino acid sequence (SEQ ID NO: 107) are set forth below.

SEQ ID NO: 106

ATGGTAAGCTCATATATGTTTGCGAGAGGAGAGAAAATGAATAACAAAAT
GTTTTTGAACAAAGAAGCCGGTTTTTTGGTACACACAAAAAGAAAAAGGC
GATTTGCTGTCACTTTAGTGGGAGTCTTTTTTCTGCTTTTGGCATGTGCG
GGTGCTATCGGTTTTGGTCAAGTAGCCTATGCTGCGGATGAGAAGACTGT
GCCGAATTTTAAAAGCCCAGATCCAGATTATCCCTGGTATGGTTATGATT
CGTATAGAGGAATATTTGCAAGATATCACAATTTAAAAGTAAATCTAAAA
GGAAGTAAGGAGTATCAAGCGTATTGTTTTAACCTAACAAAATACTTTCC
TCGCCCCACTTATAGTACTACAAATAATTTTTACAAGAAAATTGATGGGA
GTGGATCAGCGTTCAAATCTTATGCAGCGAATCCTAGGGTTTTAGATGAG
AATTTAGATAAATTAGAAAAAAATATACTGAATGTAATTTATAATGGATA
TAAAAGTAATGCAAATGGTTTTATGAATGGTATAGAAGATCTTAATGCTA
TACTAGTAACTCAAAACGCTATTTGGTACTATTCAGATAGTGCTCCATTA
AATGATGTTAATAAAATGTGGGAAAGAGAGGTTCGGAATGGGGAGATTAG
TGAGTCACAAGTTACTTTAATGCGTGAGGCATTGAAAAAACTAATTGATC
CCAATTTAGAAGCTACTGCAGCTAATAAAATCCCATCAGGATATCGTTTA
AATATCTTTAAGTCTGAAAATGAAGATTACCAAAATCTTTTAAGTGCTGA
ATATGTACCTGATGATCCCCCTAAACCTGGTGATACGTCAGAACATAATC
CTAAAACTCCCGAGTTGGATGGCACTCCAATTCCCGAGGACCCAAAACGT
CCAGATGAGAGTTCAGAACCTGCGCTTCCCCCATTAATGCCAGAGCTAGA
TGGTGAAGAAGTCCCAGAAGTTCCAAGCGAGAGCTTAGAACCTGCGCTTC
CCCCATTGATGCCAGAGCTAGATGGTGAAGAAGTCCCAGAAGTTCCAAGC
GAGAGCTTAGAACCTGCGCTTCCCCCATTGATGCCAGAGCTAGATGGTGA
AGAAGTCCCAGAAGTTCCAAGCGAGAGCTTAGAACCTGCGCTTCCCCCAT
TAATGCCAGAGCTAGATGGTGAAGAAGTCCCAGAAGTTCCAAGCGAGAGC
TTAGAACCTGCGCTTCCCCCATTGATGCCAGAGTTAGATGGTGAAGAAGT
CCCTGAAAAACCTAGTGTTGACTTACCTATTGAAGTTCCTCGTTATGAGT
TTAACAATAAAGACCAGTCACCTCTAGCGGGTGAGTCTGGTGAGACGGAG
TATATTACCGAAGTCTATGGAAATCAACAGAACCCTGTTGATATTGATAA
AAAACTTCCGAATGAAACAGGTTTTTCAGGAAATATGGTTGAGACAGAAG
ATACGAAAGAGCCAGAAGTGTTGATGGGAGGTCAAAGTGAGTCTGTTGAA
TTTACTAAAGACACTCAAACAGGCATGAGTGGTCAAACAACTCCTCAGGT
TGAGACAGAAGATACGAAAGAGCCAGAAGTGTTGATGGGAGGTCAAAGTG
AGTCTGTTGAATTTACTAAAGACACTCAAACAGGCATGAGTGGTCAAACA
ACTCCTCAGGTTGAGACAGAAGATACGAAAGAGCCAGGAGTGTTGATGGG
AGGCCAAAGTGAGTCTGTTGAATTTACTAAAGACACTCAAACAGGCATGA
GTGGTCAAACAACTCCTCAGGTTGAGACAGAAGACACGAAAGAGCCAGGA
GTGTTGATGGGAGGTCAAAGTGAGTCTGTTGAATTTACTAAAGACACTCA
AACAGGCATGAGCGGTTTCAGTGAAACAGTGACCATTGTTGAAGATACGC
GTCCGAAGTTAGTGTTCCATTTTGACAATAATGAGCCCAAAGTGGAAGAG
AATCGGGAAAAGCCTACAAAAAATATAACACCTATCCTTCCTGCAACAGG
AGATATTGAGAATGTTTTGGCCTTTCTTGGAATCCTTATTTTGTCAGTAC
TTTCTATTTTTAGCCTTTTAAAAAACAAACAAAACAATAAAGTCTGA

SEQ ID NO: 107

MVSSYMFARGEKMNNKMFLNKEAGFLVHTKRKRRFAVTLVGVFFLLLACA
GAIGFGQVAYAADEKTVPNFKSPDPDYPWYGYDSYRGIFARYHNLKVNLK
GSKEYQAYCFNLTKYFPRPTYSTTNNFYKKIDGSGSAFKSYAANPRVLDE
NLDKLEKNILNVIYNGYKSNANGFMNGIEDLNAILVTQNAIWYYSDSAPL
NDVNKMWEREVRNGEISESQVTLMREALKKLIDPNLEATAANKIPSGYRL
NIFKSENEDYQNLLSAEYVPDDPPKPGDTSEHNPKTPELDGTPIPEDPKR
PDESSEPALPPLMPELDGEEVPEVPSESLEPALPPLMPELDGEEVPEVPS
ESLEPALPPLMPELDGEEVPEVPSESLEPALPPLNPELDGEEVPEVPSES
LEPALPPLMPELDGEEVPEKPSVDLPIEVPRYEFNNKDQSPLAGESGETE
YITEVYGNQQNPVDIDKKLPNETGFSGNMVETEDTKEPEVLMGGQSESVE
FTKDTQTGMSGQTTPQVETEDTKEPEVLMGGQSESVEFTKDTQTGMSGQT
TPQVETEDTKEPGVLMGGQSESVEFTKDTQTGMSGQTTPQVETEDTKEPG
VLHGGQSESVEFTKDTQTGMSGFSETVTIVEDTRPKLVFHFDNNEPKVEE
NREKPTKNITPILPATGDIENVLAFLGILILSVLSIFSLLKNKQNNKV

[1090] 19224134 contains an amino acid motif indicative of a cell wall anchor: SEQ ID NO: 181 LPATG (shown in italics in SEQ ID NO: 107, above). In some recombinant host cell systems, it may be preferable to remove this motif to facilitate secretion of a recombinant 19224134 protein from the host cell. Alternatively, in other recombinant host cell systems, it may be preferable to use the cell wall anchor motif to anchor the recombinantly expressed protein to the cell wall. The extracellular

[symbol]

be left attached to either inactivated host cells or cell membranes in the final composition.

[1091] A pilin motif, discussed above, containing a conserved lysine (K) residue has also been identified in 19224134. The pilin motif sequence is underlined in SEQ ID NO: 107, below. Conserved lysine (K) residues are also marked in bold, at amino acid residues 275, 285, and 299. The pilin sequence, in particular the conserved lysine residues, are thought to be important for the formation of oligomeric, pilus-like structures. Preferred fragments of 19224134 include at least one conserved lysine residue. Preferably, fragments include the pilin sequence.

SEQ ID NO: 107

MVSSYMFARGEKMNNKMFLNKEAGFLVHTKRKRRFAVTLVGVFFLLLACA
GAIGFGQVAYAADEKTVPNFKSPDPDYPWYGYDSYRGIFARYHNLKVNLK
GSKEYQAYCFNLTKYFPRPTYSTTNNFYKKIDGSGSAFKSYAANPRVLDE
NLDKLEKNILNVIYNGYKSNANGFMNGIEDLNAILVTQNAIWYYSDSAPL
NDVNKMWEREVRNGEISESQVTLMREALKKLIDPNLEATAANKIPSGYRL
NIFKSENEDYQNLLSAEYVPDDPPKPGDTSEHNPKTPELDGTPIPEDPKR
PDESSEPALPPLMPELDGEEVPEVPSESLEPALPPLMPELDGEEVPEVPS
ESLEPALPPLMPELDGEEVPEVPSESLEPALPPLMPELDGEEVPEVPSES
LEPALPPLMPELDGEEVPEKPSVDLPIEVPRYEFNNKDQSPLAGESGETE
YITEVYGNQQNPVDIDKKLPNETGFSGNMVETEDTKEPEVLMGGQSESVE
FTKDTQTGMSGQTTPQVETEDTKEPEVLMGGQSESVEFTKDTQTGMSGQT
TPQVETEDTKEPGVLMGGQSESVEFTKDTQTGMSGQTTPQVETEDTKEPG
VLMGGQSESVEFTKDTQTGMSGFSETVTIVEDTRPKLVFHFDNNEPKVEE
NREKPTKNITPILPATGDIENVLAFLGILILSVLSIFSLLKNKQNNKV

[1092] Two E boxes containing conserved glutamic residues have been identified in 19224134. The E-box motifs are underlined in SEQ ID NO: 107, below. The conserved glutamic acid (E) residues, at amino acid residues 487 and 524, are marked in bold. The E box motifs, in particular the conserved glutamic acid residues, are thought to be important for the formation of oligomeric pilus-like structures of 19224134. Preferred fragments of 19224134 include at least one conserved glutamic acid residue. Preferably, fragments include at least one E box motif.

SEQ ID NO: 107

MVSSYMFARGEKMNNKMFLNKEAGFLVHTKRKRRFAVTLVGVFFLLLACA
GAIGFGQVAYAADEKTVPNFKSPDPDYPWYGYDSYRGIFARYHNLKVNLK
GSKEYQAYCFNLTKYFPRPTYSTTNNFYKKIDGSGSAFKSYAANPRVLDE
NLDKLEKNILNVIYNGYKSNANGFMNGIEDLNAILVTQNAIWYYSDSAPL
NDVNKMWEREVRNGEISESQVTLMREALKKLIDPNLEATAANKIPSGYRL
NIFKSENEDYQNLLSAEYVPDDPPKPGDTSEHNPKTPELDGTPIPEDPKR
PDESSEPALPPLMPELDGEEVPEVPSESLEPALPPLMPELDGEEVPEVPS
ESLEPALPPLMPELDGEEVPEVPSESLEPALPPLMPELDGEEVPEVPSES
LEPALPPLMPELDGEEVPEKPSVDLPIEVPRYEFNNKDQSPLAGESGETE
YITEVYGNQQNPVDIDKKLPNETGFSGNMVETEDTKEPEVLMGGQSESVE
FTKDTQTGMSGQTTPQVETEDTKEPEVLMGGQSESVEFTKDTQTGMSGQT
TPQVETEDTKEPGVLMGGQSESVEETKDTQTGMSGQTTPQVETEDTKEPG
VLMGGQSESVEFTKDTQTGMSGFSETVTIVEDTRPKLVFHFDNNEPKVEE
NREKPTKNITPILPATGDIENVLAFLGILILSVLSIFSLLKNKQNNKV

[1093] 19224135 is thought to be a capsular polysaccharide adhesin (Cpa) protein. An example of a nucleotide sequence encoding the Cpa protein (SEQ ID NO: 108) and a Cpa protein amino acid sequence (SEQ ID NO: 109) are set forth below.

SEQ ID NO: 108

ATGAATAACAAAAAATTGCAAAAGAAGCAAGATGCTCCTCGGGTATCAAA
CAGAAAGCCAAAACAATTAACTGTCACTTTAGTGGGAGTATTTTTAATGT
TTTTGACCTTGGTAAGTTCCATGAGAGGTGCTCAAAGCATATTTGGAGAG
GAAAAGAGAATTGAAGAAGTCAGTGTTCCTAAAATAAAAAGTCCAGATGA
TGCCTACCCTTGGTATGGCTATGATTCATATGACTCTAGTCATCCTTACT
ATGAACGTTTTAAAGTAGCACATGATTTAAGGGTTAATTTAAATGGAAGT
AAGAGCTACCAAGTATATTGCTTTAATATCAATTCTCATTATCCGAATAG
AAAAAATGCTTTTTCTAAACAATGGTTTAAGAGAGTTGATGGGACAGGTG
ATGTGTTCACAAATTATGCTCAGACACCTAAGATTCGTGGAGAATCATTG
AATAATAAACTTTTAAGTATTATGTACAACGCTTATCCTAAAAATGCTAA
TGGCTATATGGATAAGATAGAACCATTAAATGCTATTTTAGTAACTCAAC
AAGCTGTTTGGTACTATTCTGACAGTTCTTATGGTAATATAAAAACGTTA
TGGGCATCTGAGCTTAAAGACGGAAAAATAGATTTTGAACAAGTAAAATT
AATGCGTGAAGCTTACTCAAAACTAATTAGTGATGATTTAGAAGAAACAT
CTAAAAATAAGCTACCTCAAGGATCTAAACTGAATATTTTTGTTCCGCAA
GATAAATCTGTTCAAAATTTATTAAGTGCAGAGTACGTGCCTGAATCCCC
TCCGGCACCAGGTCAGTCTCCAGAACCGCCAGTGCAAACAAAAAAAACAT
CAGTCATTATCAGAAAATATGCGGAAGGTGACTACTCTAAACTTCTAGAG
GGAGCAACTTTGCGTTTAACAGGGGAAGATATCCTAGATTTTCAAGAAAA
AGTCTTCCAAAGTAATGGAACAGGAGAAAAGATTGAATTATCAAATGGGA
CTTATACCTTAACAGAAACATCATCTCCAGATGGATATAAAATTGCGGAG
CCGATTAAGTTTAGAGTAGTGAATAAAAAAGTATTTATCGTCCAAAAAGA
TGGTTCTCAAGTGGAAAATCCAAACAAAGAAGTAGCAGAGCCATACTCAG
TGGAAGCGTACAGCGATATGCAAGATAGTAACTATATTAATCCAGAAACG
TTCACTCCTTATGGGAAATTTTATTACGCTAAAAATAAGGATAAAAGTTC
ACAAGTTGTCTACTGTTTTAATGCTGATTTACACTCTCCACCTGAATCAG
AGGATGGGGGAGGAACTATAGATCCTGATATTAGTACGATGAAAGAAGTC
AAGTACACACATACGGCAGGTAGTGATTTGTTTAAATACGCGCTAAGACC
GAGAGATACAAATCCAGAAGACTTCTTAAAGCACATTAAAAAAGTAATTG
AAAAAGGCTACAATAAAAAAGGTGATAGCTATAATGGATTAACAGAAACA
CAGTTTCGCGCGGCTACTCAGCTTGCTATCTATTACTTTACAGACAGCAC
TGACTTAAAAACCTTAAAAACTTATAACAATGGGAAAGGTTACCATGGAT
TTGAATCTATGGATGAAAAAACCCTAGCTGTAACAAAAGAATTAATTAAT
TACGCTCAAGATAATAGTGCCCCTCAACTAACAAATCTTGATTTCTTCGT
ACCTAATAATAGCAAATACCAATCTCTTATTGGGACAGAATACCATCCAG
ATGATTTGGTTGACGTGATTCGTATGGAAGATAAAAAGCAAGAAGTTATT
CCAGTAACTCACAGTTTGACAGTGAAAAAAACAGTAGTCGGTGAGTTGGG
AGATAAAACTAAAGGCTTCCAATTTGAACTTGAGTTGAAAGATAAAACTG
GACAGCCTATTGTTAACACTCTAAAAACTAATAATCAAGATTTAGTAGCT
AAAGATGGGAAATATTCATTTAATCTAAAGCATGGTGACACCATAAGAAT
AGAAGGATTACCGACGGGATATTCTTATACTCTGAAAGAGACTGAAGCTA
AGGATTATATAGTAACCGTTGATAACAAAGTTAGTCAAGAAGCTCAATCA
GCAAGTGAGAATGTCACAGCAGACAAAGAAGTCACTTTTGAAAACCGTAA
AGATCTTGTCCCACCAACTGGTTTTATTACTGATGGTGGAACCTATCTGT
GGTTATTATTGCTTGTCCCATTTGGTTTGTTAGTGTGGTTCTTTGGTCGT
AAAGGACTAAAAAATGACTAA

SEQ ID NO: 109

MNNKKLQKKQDAPRVSNRKPKQLTVTLVGVFLMFLTLVSSNRGAQSIFGE
EKRIEEVSVPKIKSPDDAYPWYGYDSYDSSHPYYERFKVAHDLRVNLNGS
KSYQVYCFNINSHYPNRKNAFSKQWFKRVDGTGDVFTNYAQTPKIRGESL
NNKLLSIMYNAYPKNANGYMDKIEPLNAILVTQQAVWYYSDSSYGNIKTL
WASELKDGKIDFEQVKLMREAYSKLISDDLEETSKNKLPQGSKLNIFVPQ
DKSVQNLLSAEYVPESPPAPGQSPEPPVQTKKTSVIIRKYAEGDYSKLLE
GATLRLTGEDILDFQEKVFQSNGTGEKIELSNGTYTLTETSSPDGYKIAE
PIKFRVVNKKVFIVQKDGSQVENPNKEVAEPYSVEAYSDMQDSNYINPET
FTPYGKFYYAKNKDKSSQVVYCFNADLHSPPESEDGGGTIDPDISTMKEV
KYTHTAGSDLFKYALRPRDTNPEDFLKHIKKVIEKGYNKKGDSYNGLTET
QFRAATQLAIYYFTDSTDLKTLKTYNNGKGYHGFESMDEKTLAVTKELIN
YAQDNSAPQLTNLDFFVPWNSKYQSLIGTEYHPDDLVDVIRNEDKKQEVI
PVTHSLTVKKTVVGELGDKTKGFQFELELKDKTGQPIVNTLKTNNQDLVA
KDGKYSFNLKHGDTIRIEGLPTGYSYTLKETEAKDYIVTVDNKVSQEAQS
ASENVTADKEVTFENRKDLVPPTGFITDGGTYLWLLLLVPFGLLVWFFGR
KGLKND

[1094] 19224135 contains an amino acid motif indicative of a cell wall anchor: SEQ ID NO: 184 VPPTG (shown in italics in SEQ ID NO: 109, above). In some recombinant host cell systems, it may be preferable to remove this motif to facilitate secretion of a recombinant 19224135 protein from the host cell. Alternatively, in other recombinant host cell systems, it may be preferable to use the cell wall anchor motif to anchor the recombinantly expressed protein to the cell wall. The extracellular domain of the expressed protein may be cleaved during purification or the recombinant protein may be left attached to either inactivated host cells or cell membranes in the final composition.

[1095] A pilin motif, discussed above, containing a conserved lysine (K) residue has also been identified in 19224135. The pilin motif sequence is underlined in SEQ ID NO: 109, below. Conserved lysine (K) residues are also marked in bold, at amino acid residues 164 and 172. The pilin sequence, in particular the conserved lysine residues, are thought to be important for the formation of oligomeric, pilus-like structures. Preferred fragments of 19224135 include at least one conserved lysine residue. Preferably, fragments include the pilin sequence.

SEQ ID NO: 109

MNNKKLQKKQDAPRVSNRKPKQLTVTLVGVFLMFLTLVSSMRGAQSIFGE
EKRIEEVSVPKIKSPDDAYPWYGYDSYDSSHPYYERFKVAHDLRVNLNGS
KSYQVYCFNINSHYPNRKNAFSKQWFKRVDGTGDVFTNYAQTPKIRGESL
NNKLLSIMYNAYPKNANGYMDKIEPLNAILVTQQAVWYYSDSSYGNIKTL
WASELKDGKIDFEQVKLNREAYSKLISDDLEETSKNKLPQGSKLNIFVPQ
DKSVQNLLSAEYVEESPPAPGQSPEPPVQTKKTSVIIRKYAEGDYSKLLE
GATLRLTGEDILDFQEKVFQSNGTGEKIELSNGTYTLTETSSPDGYKIAE
PIKFRVVNKKVFIVQKDGSQVENPNKEVAEPYSVEAYSDMQDSNYINPET
FTPYGKFYYAKNKDKSSQVVYCFNADLHSPPESEDGGGTIDPDISTMKEV
KYTHTAGSDLFKYALRPRDTNPEDFLKHIKKVIEKGYNKKGDSYNGLTET
QFRAATQLAIYYFTDSTDLKTLKTYNNGKGYHGFESMDEKTLAVTKELIN
YAQDNSAPQLTNLDFFVPNNSKYQSLIGTEYHPDDLVDVIRMEDKKQEVI
PVTHSLTVKKTVVGELGDKTKGFQFELELKDKTGQPIVNTLKTNNQDLVA
KDGKYSFNLKHGDTIRIEGLPTGYSYTLKETEAKDYIVTVDNKVSQEAQS
ASENVTADKEVTFENRKDLVPPTGFITDGGTYLWLLLLVPFGLLVWFFGR
KGLKND

[1096] An E box containing a conserved glutamic residue has been identified in 19224135. The E-box motif is underlined in SEQ ID NO: 109, below. The conserved glutamic acid (E), at amino acid residue 339, is marked in bold. The E box motif, in particular the conserved glutamic acid residue, is thought to be important for the formation of oligomeric pilus-like structures of 19224135. Preferred fragments of 19224135 include the conserved glutamic acid residue. Preferably, fragments include the E box motif.

SEQ ID NO: 109

MNNKKLQKKQDAPRVSNRKPKQLTVTLVGVFLMFLTLVSSMRGAQSIFGE
EKRIEEVSVPKIKSPDDAYPWYGYDSYDSSHPYYERFKVAHDLRVNLNGS
KSYQVYCFNINSHYPNRKNAFSKQWFKRVDGTGDVFTNYAQTPKIRGESL
NNKLLSIMYNAYPKNANGYMDKIEPLNAILVTQQAVWYYSDSSYGNIKTL
WASELKDGKIDFEQVKLMREAYSKLISDDLEETSKNKLPQGSKLNIFVPQ
DKSVQNLLSAEYVPESPPAPGQSPEPPVQTKKTSVIIRKYAEGDYSKLLE
GATLRLTGEDILDFQEKVFQSNGTGEKIELSNGTYTLTETSSPDGYKIAE
PIKFRVVNKKVFIVQKDGSQVENPNKEVAEPYSVEAYSDMQDSNYINPET
FTPYGKFYYAKNKDKSSQVVYCFNADLHSPPESEDGGGTIDPDISTHKEV
KYTHTAGSDLFKYALRPRDTNPEDFLKHIKKVIEKGYNKKGDSYNGLTET
QFRAATQLAIYYFTDSTDLKTLKTYNNGKGYHGFESMDEKTLAVTKELIN
YAQDNSAPQLTNLDFFVPNNSKYQSLIGTEYHPDDLVDVIRHEDKKQEVI
PVTHSLTVKKTVVGELGDKTKGFQFELELKDKTGQPIVNTLKTNNQDLVA
KDGKYSFNLKRGDTIRIEGLPTGYSYTLKETEAKDYIVTVDNKVSQEAQS
ASENVTADKEVTFENRKDLVPPTGFITDGGTYLWLLLLVPFGLLVWFFGR
KGLKND

[1097] 19224136 is thought to be a LepA protein. An example of a nucleotide sequence encoding the LepA protein (SEQ ID NO: 110) and a LepA protein amino acid sequence (SEQ ID NO: 111) are set forth below.

SEQ ID NO: 110

ATGACTAATTACCTAAATCGCTTAAATGAGAATCCACTATTTAAAGCTTT
CATACGGTTAGTACTTAAGATTTCTATTATTGGATTTCTAGGTTACATTC
TATTTCAGTATGTTTTTGGCGTCATGATTGTTAACACAAATCAGATGAGT
CCTGCTGTAAGTGCTGGTGATGGAGTCTTATATTATCGTTTGACTGATCG
CTATCATATTAATGATGTGGTGGTCTATGAGGTTGATAACACTTTGAAAG
TTGGTCGAATTGCCGCTCAAGCTGGCGATGAGGTTAGTTTTACGCAAGAA
GGAGGACTGTTGATTAATGGGCATCCACCAGAAAAAGAGGTCCCTTACCT
GACGTATCCTCACTCAAGTGGTCCAAACTTTCCCTATAAAGTTCCTACGG
GTACGTATTTCATATTGAATGATTATCGTGAAGAACGTTTGGACAGTCGT
TATTATGGGGCGTTACCCATCAATCAAATCAAAGGGAAAATCTCAACTCT
ATTAAGAGTGAGAGGAATTTAA

SEQ ID NO: 111

MTNYLNRLNENPLFKAFIRLVLKISIIGFLGYILEQYVFGVMIVNTNQNS
PAVSAGDGVLYYRLTDRYHINDVVVYEVDNTLKVGRIAAQAGDEVSFTQE
GGLLINGHPPEKEVPYLTYPHSSGPNFPYKVPTGTYFILNDYREERLDSR
YYGALPINQIKGKISTLLRVRGI

[1098] 19224137 is thought to be a fimbrial protein. An example of a nucleotide sequence encoding the fimbrial protein (SEQ ID NO: 112) and a fimbrial protein amino acid sequence (SEQ ID NO: 113) are set forth below.

SEQ ID NO: 112

[symbol]

AATCTTAGCAACTGCTTT
AGGAACAGCTTCTTTAAATCAAAACGTAAAAGCTGAGACGGCAGGGGTTG
TTAGCAGTGGTCAATTAACAATAAAAAAATCAATTACAAATTTTAATGAT
GATACACTTTTGATGCCTAAGACAGACTATACTTTTAGCGTTAATCCGGA
TAGTGCGGCTACAGGTACTGAAAGTAATTTACCAATTAAACCAGGTATTG
CTGTTAACAATCAAGATATTAAGGTTTCTTATTCTAATACTGATAAGACA
TCAGGTAAAGAAAAACAAGTTGTTGTTGACTTTATGAAAGTTACTTTTCC
TAGCGTTGGTATTTACCGTTATGTTGTTACCGAGAATAAAGGGACAGCAG
AAGGAGTTACATATGATGATACAAAATGGTTAGTTGACGTCTATGTTGGT
AATAATGAAAAGGGAGGTCTTGAACCAAAGTATATTGTATCTAAAAAAGG
AGATTCTGCTACTAAAGAACCAATCCAGTTTAATAATTCATTCGAAACAA
CGTCATTAAAAATTGAAAAGGAAGTTACTGGTAATACAGGAGATCATAAA
AAAGCATTTACCTTTACATTAACATTGCAACCAAATGAATACTATGAGGC
AAGTTCGGTTGTGAAAATTGAAGAGAACGGACAAACGAAAGATGTGAAAA
TTGGGGAGGCATATAAGTTTACTTTGAACGATAGTCAGAGTGTGATATTG
TCTAAATTACCAGTTGGTATTAATTATAAAGTTGAAGAAGCAGAAGCTAA
TCAAGGTGGATATACTACAACAGCAACTTTAAAAGATGGAGAAAAGTTAT
CTACTTATAACTTAGGTCAGGAACATAAAACAGACAAGACTGCTGATGAA
ATCGTTGTCACAAATAACCGTGACACTCAAGTTCCAACTGGTGTTGTAGG
CACCCTTGCTCCATTTGCAGTTCTTAGCATTGTGGCTATTGGTGGAGTTA
TCTATATTACAAAACGTAAAAAAGCTTAA

SEQ ID NO: 113

MKKNKLLLATAILATALGTASLNQNVKAETAGVVSSGQLTIKRSITNFND
DTLLMPKTDYTFSVNPDSAATGTESNLPIKPGIAVNNQDIKVSYSNTDKT
SGKEKQVVVDFMKVTFPSVGIYRYVVTENKGTAEGVTYDDTKWLVDVYVG
NNEKGGLEPKYIVSKKGDSATKEPIQFNNSFETTSLKIEKEVTGNTGDHK
KAFTFTLTLQPNEYYEASSVVKIEENGQTIWVKIGEAYKFTLNDSQSVIL
SKLPVGINYKVEEAEANQGGYTTTATLKDGEKLSTYNLGQEHKTDKTADE
IVVTNNRDTQVPTGVVGTLAPFAVLSIVAIGGVIYITKRKKA

[symbol]

indicates data missing or illegible when filed

[1099] 19224137 contains an amino acid motif indicative of a cell wall anchor: SEQ ID NO: 140 QVPTG (shown in italics in SEQ ID NO: 113, above). In some recombinant host cell systems, it may be preferable to remove this motif to facilitate secretion of a recombinant 19224137 protein from the host cell. Alternatively, in other recombinant host cell systems, it may be preferable to use the cell wall anchor motif to anchor the recombinantly expressed protein to the cell wall. The extracellular domain of the expressed protein may be cleaved during purification or the recombinant protein may be left attached to either inactivated host cells or cell membranes in the final composition.

[1100] A pilin motif, discussed above, containing a conserved lysine (K) residue has also been identified in 19224137. The pilin motif sequence is underlined in SEQ ID NO: 113, below. A conserved lysine (K) residue is also marked in bold, at amino acid residue 160. The pilin sequence, in particular the conserved lysine residues, are thought to be important for the formation of oligomeric, pilus-like structures. Preferred fragments of 19224137 include the conserved lysine residue. Preferably, fragments include the pilin sequence.

SEQ ID NO: 113

MKKNKLLLATAILATALGTASLNQNVKAETAGVVSSGQLTIKKSITNFND
DTLLMPKTDYTFSVNPDSAATGTESNLPIKPGIAVNNQDIKVSYSNTDKT
SGKEKQVVVDFHKVTFPSVGIYRYVVTENKGTAEGVTYDDTKWLVDVYVG
NNEKGGLEPKYIVSKKGDSATKEPIQFNNSFETTSLKIEKEVTGNTGDHK
KAETFTLTLQPNEYYEASSVVKIEENGQTKDVKIGEAYKFTLNDSQSVIL
SKLPVGINYKVEEAEANQGGYTTTATLKDGEKLSTYNLGQEHKTDKTADE
IVVTNNRDTQVPTGVVGTLAPFAVLSIVAIGGVIYITKRKKA

[1101] An E box containing a conserved glutamic residue has been identified in 19224137. The E-box motif is underlined in SEQ ID NO: 113, below. The conserved glutamic acid (E), at amino acid residue 263, is marked in bold. The E box motif, in particular the conserved glutamic acid residue, is thought to be important for the formation of oligomeric pilus-like structures of 19224137. Preferred fragments of 19224137 include the conserved glutamic acid residue. Preferably, fragments include the E box motif.

SEQ ID NO: 113

MKKNKLLLATAILATALGTASLNQNVKAETAGVVSSGQLTIKKSITNFND
DTLLMPKTDYTFSVNPDSAATGTESNLPIKPGIAVNNQDIKVSYSNTDKT
SGKEKQVVVDFHKVTFPSVGIYRYVVTENKGTAEGVTYDDTKWLVDVYVG
NNEKGGLEPKYIVSKKGDSATKEPIQFNNSFETTSLKIEKEVTGNTGDHK
KAETFTLTLQPNEYYEASSVVKIEENGQTKDVKIGEAYKFTLNDSQSVIL
SKLPVGINYKVEEAEANQGGYTTTATLKDGEKLSTYNLGQEHKTDKTADE
IVVTNNRDTQVPTGVVGTLAPFAVLSIVAIGGVIYITKRKKA

[1102] 19224138 is thought to be a SrtC2-type sortase. An example of a nucleotide sequence encoding the SrtC2 sortase (SEQ ID NO: 114) and a SrtC2 sortase amino acid sequence (SEQ ID NO: 115) are set forth below.

SEQ ID NO: 114

ATGATGATGACAATTGTACAGGTTATCAATAAAGCCATTGATACTCTCAT
TCTTATCTTTTGTTTAGTCGTACTATTTTTAGCTGGTTTTGGTTTGTGGG
ATTCTTATCATCTCTATCAACAAGCAGACGCTTCTAATTTCAAAAAATTT
AAAACAGCTCAACAACAGCCTAAATTTGAAGACTTGTTAGCTTTGAATGA
GGATGTCATTGGTTGGTTAAATATCCCGGGGACTCATATTGATTATCCTC
TAGTTCAGGGAAAAACGAATTTAGAGTATATTAATAAAGCAGTTGATGGC
AGTGTTGCCATGTCTGGTAGTTTATTTTTAGATACACGGAATCATAATGA
TTTTACGGACGATTACTCTCTGATTTATGGCCATCATATGGCAGGTAATG
CCATGTTTGGCGAAATTCCAAAATTTTTAAAAAAGGATTTTTTCAACAAA
CATAATAAAGCTATCATTGAAACAAAAGAGAGAAAAAAACTAACCGTCAC
TATTTTTGCTTGTCTCAAGACAGATGCCTTTGACCAGTTAGTTTTTAATC
CTAATGCTATTACCAATCAAGACCAACAAAGGCAGCTCGTTGATTATATC
AGTAAAAGATCAAAACAATTTAAACCTGTTAAATTGAAGCATCATACAAA
GTTCGTTGCTTTTTCAACGTGTGAAATTTTTCTACTGACATCGTGTTATC
GTTGTCGGTACTATTCAAGAATAA

SEQ ID NO: 115

MMMTIVQVINKAIDTLILIFCLVVLFLAGFGLWDSYHLYQQADASNFKKF
KTAQQQPKFEDLLALNEDVIGWLNIPGTHIDYPLVQGKTNLEYINKAVDG
SVAMSGSLFLDTRNHNDFTDDYSLIYGHHMAGNAMFGEIPKFLKKDFFNK
HNKAIIETKERKKLTVTIFACLKTDAFDQLVFNPNAITNQDQQRQLVDYI
SKRSKQFKPVKLKHHTKFVAFSTCENFSTDNRVIVVGTIQE

[1103] 19224139 is an open reading frame that encodes a sortase substrate motif LPXAG shown in italics in SEQ ID NO: 117. An example of a nucleotide sequence of the open reading frame (SEQ ID NO: 116) and the amino acid sequence encoded by the open reading frame (SEQ ID NO: 117) are set forth below.

SEQ ID NO: 116

ATGTTATTTTCTGTCGTAATGATATTAACCATGCTGGCCTTTAATCAGAC
TGTTTTAGCAAAAGACAGCACTGTTCAAACTAGCATTAGTGTCGAAAATG
TCTTAGAGAGAGCAGGCGATAGTACCCCATTTTCGATTGCATTAGAATCA
ATTGATGCGATGAAAACAATAGAAGAAATAACAATTGCTGGTTCTGGAAA
AGCAAGCTTTTCCCCTCTGACCTTCACAACAGTTGGGCAATATACTTATC
GTGTTTATCAGAAGCCTTCACAAAATAAAGATTATCAAGCAGATACTACT
GTATTTGACGTTCTTGTCTATGTGACCTATGATGAAGATGGGACTCTAGT
CGCAAAAGTTATTTCTCGAAGGGCTGGAGACGAAGAAAAATCAGCGATTA
CTTTTAAGCCCAAACGGTTAGTAAAACCAATACCGCCTAGACAACCTAAC
ATCCCTAAAACCCCATTACCATTAGCTGGTGAAGTAAAAAGTTTATTGGG
TATCTTAAGTATCGTATTACTGGGGTTACTAGTTCTTCTTTATGTTAAAA
AACTGAAGAG

SEQ ID NO: 117

MLFSVVMILTMLAFNQTVLAKDSTVQTSISVENVLERAGDSTPFSIALES
IDAMKTIEEITIAGSGKASFSPLTFTTVGQYTYRVYQKPSQNKDYQADTT
VFDVLVYVTYDEGTLVAKVISRRAGDEEKSAITFKPKRLVKPIPPRQPNI
PKTPLPLAGEVKSLLGILSIVLLGLLVLLYVKKLKSKL

[1104] 19224139 contains an amino acid motif indicative of a cell wall anchor: SEQ ED NO: 185 LPLAG (shown in italics in SEQ ID NO: 117, above). In some recombinant host cell systems, it may be preferable to remove this motif to facilitate secretion of a recombinant 19224139 protein from the host cell. Alternatively, in other recombinant host cell systems, it may be preferable to use the cell wall anchor motif to anchor the recombinantly expressed protein to the cell wall. The extracellular

[symbol]

be left attached to either inactivated host cells or cell membranes in the final composition.

[1105] A pilin motif, discussed above, containing a conserved lysine (K) residue has also been identified in 19224139. The pilin motif sequence is underlined in SEQ ID NO: 117, below. A conserved lysine (K) residue is also marked in bold, at amino acid residue 138. The pilin sequence, in particular the conserved lysine residue, is thought to be important for the formation of oligomeric, pilus-like structures. Preferred fragments of 19224139 include the conserved lysine residue. Preferably, fragments include the pilin sequence.

SEQ ID NO: 117

MLFSVVMILTMLAFNQTVLAKDSTVQTSISVENVLERAGDSTPFSIALES
IDAMKTIEEITIAGSGKASFSPLTFTTVGQYTYRVYQKPSQNKDYQADTT
VFDVLVYVTYDEGTLVAKVISRRAGDEEKSAITFKPKRLVKPIPPRQPNI
PKTPLPLAGEVKSLLGILSIVLLGLLVLLYVKKLKSKL

[1106] Two E boxes containing conserved glutamic residues have been identified in 19224139. The E-box motifs are underlined in SEQ ID NO: 117, below. The conserved glutamic acid (E) residues, at amino acid residues 58 and 128, are marked in bold. The E box motifs, in particular the conserved glutamic acid residues, are thought to be important for the formation of oligomeric pilus-like structures of 19224139. Preferred fragments of 19224139 include at least one conserved glutamic acid residue. Preferably, fragments include at least one E box motif.

SEQ ID NO: 117

MLFSVVMILTMLAFNQTVLAKDSTVQTSISVENVLERAGDSTPFSIALES
IDAMKTIEEITIAGSGKASFSPLTFTTVGQYTYRVYQKPSQNKDYQADTT
VFDVLVYVTYDEGTLVAKVISRRAGDEEKSAITFKPKRLVKPIPPRQPNIP
PKTPLPLAGEVKSLLGILSIVLLGLLVLLYVKKLKSKL

[1107] 19224140 is thought to be a MsmRL protein. An example of a nucleotide sequence encoding the MsmRL protein (SEQ ID NO: 118) and a MsmRL protein amino acid sequence (SEQ ID NO: 119) are set forth below.

SEQ ID NO: 118

ATGGTTATATTCGATTTAAAACATGTGCAAACATTACACAGCTTGTCTCA
ATTACCTATTTCAGTGATGTCACAAGATAAGGCACTTATTCAAGTATATG
GTAATGACGACTATTTATTATGTTACTATCAATTTTTAAAGCATCTAGCT
ATTCCTCAAGCTGCACAAGATGTTATTTTTTATGAGGGTTTATTTGAAGA
GTCCTTTATGATTTTTCCTCTTTGTCACTACATTATTGCCATTGGACCTT
TCTACCCTTATTCACTTAATAAAGACTATCAGGAACAATTAGCTAATAAT
TTTTTAAAACATTCTTCTCATCGTAGCAAAGAAGAGCTCTTATCCTATAT
GGCACTTGTCCCACATTTTCCAATTAATAATGTGCGGAACCTTTTGATAG
CTATTGACGCTTTTTTTGACACACAATTTGAGACGACTTGCCAACAAACA
ATTCATCAATTGTTGCAGCATTCAAAACAGATGACTGCTGATCCTGATAT
CATTCATCGCCTTAAGCATATTAGCAAAGCATCTAGCCAACTACCGCCTG
TTTTAGAGCACCTAAATCATATTATGGATCTGGTAAAGCTAGGCAATCCA
CAATTGCTCAAGCAAGAAATCAATCGCATCCCCTTATCAAGTATCACCTC
ATCTTCTATTTCTGCTCTAAGGGCGGAAAAGAACCTCACTGTTATCTATT
TAACTAGGTTACTGGAATTCAGTTTTGTAGAAAATACTGACGTAGCAAAG
CATTATAGCCTTGTCAAATACTACATGGCCTTAAATGAAGAAGCGAGTGA
CTTGCTCAAAGTTTTGAGAATTCGCTGTGCAGCCATCATCCATTTTTCCG
AATCATTAACCAATAAAAGTATTTCTGATAAACGTCAAATGTACAATAGT
GTGCTTCATTATGTCGATAGTCACCTGTATTCCAAATTAAAGGTATCTGA
TATCGCTAAGCGCCTATATGTTTCCGAATCTCACTTACGTTCAGTCTTTA
AAAAATACTCAAATGTTTCCTTACAACATTATATTCTAAGTACAAAAATC
AAAGAAGCTCAACTACTCTTAAAACGAGGAATTCCTGTTGGAGAAGTGGC
TAAAAGCTTATATTTTTATGACACTACCCATTTTCATAAAATCTTTAAAA
AATACACGGGTATTTCTTCAAAAGACTATCTTGCTAAATACCGAGATAAT
ATTTAA

SEQ ID NO: 119

MVIFDLKHVQTLHSLSQLPISVMSQDKALIQVYGNDDYLLCYYQFLKHLA
IPQAAQDVIFYEGLFEESFMIFPLCHYIIAIGPFYPYSLNKDYQEQLANN
FLKHSSHRSKEELLSYMALVPHFPINNVRNLLIAIDAFFDTQFETTCQQT [symbol]
PPVLEHLNHIMDLVKLGNP
QLLKQEINRIPLSSITSSSISALRAEKNLTVIYLTRLLEFSFVENTDVAK
HYSLVKYYMALNEEASDLLKVLRIRCAAIIHFSESLTNKSISDKRQMYNS
VLHYVDSHLYSKLKVSDIAKRLYVSESHLRSVFKKYSNVSLOHYILSTKI
KEAQLLLKRGIPVGEVAKSLYFYDTTHFHKIFKKYTGISSKDYLAKYRDN
I

[symbol]

indicates data missing or illegible when filed

[1108] 19224141 is thought to be a protein F2 fibronectin binding protein. An example of a nucleotide sequence encoding the protein F2 fibronectin binding protein (SEQ ID NO: 120) and a protein F2 fibronectin binding protein amino acid sequence (SEQ ID NO: 121) are set forth below.

SEQ ID NO: 120

ATGACACAAAAAAATAGCTATAAGTTAAGCTTCCTGTTATCCCTAACAGG
ATTTATTTTAGGTTTATTATTGGTTTTTATAGGATTGTCCGGAGTATCAG
TAGGACATGCGGAAACAAGAAATGGAGCAAACAAACAAGGATCTTTTGAA
ATCAAGAAAGTCGACCAAAACAATAAGCCTTTACCGGGAGCAACTTTTTC
ACTGACATCAAAGGATGGCAAGGGAACATCTGTTCAAACGTTCACTTCAA
ATGATAAAGGTATTGTAGATGCTCAAAATCTCCAACCAGGGACTTATACC
TTAAAAGAAGAAACAGCACCAGATGGTTATGATAAAACCAGCCGGACTTG
GACAGTGACTGTTTATGAGAACGGCTATACCAAGTTGGTTGAAAATCCCT
ATAATGGGGAAATCATCAGTAAAGCAGGGTCAAAAGATGTTAGTAGTTCT
TTACAGTTGGAAAATCCCAAAATGTCAGTTGTTTCTAAATATGGGAAAAC
AGAGGTTAGTAGTGGCGCAGCGGATTTCTACCGCAACCATGCCGCCTATT
TTAAAATGTCTTTTGAGTTGAAACAAAAGGATAAATCTGAAACAATCAAC
CCAGGTGATACCTTTGTGTTACAGCTGGATAGACGTCTCAATCCTAAAGG
TATCAGTCAAGATATCCCTAAAATCATTTACGACAGTGCAAATAGTCCGC
TTGCGATTGGAAAATACCATGCTGAGAACCATCAACTTATCTATACTTTC
ACAGATTATATTGCGGGTTTAGATAAAGTCCAGTTGTCTGCAGAATTGAG
CTTATTCCTAGAGAATAAGGAAGTGTTGGAAAATACTAGTATCTCAAATT
TTAAGAGTACCATAGGTGGGCAGGAGATCACCTATAAAGGAACGGTTAAT
GTTCTTTATGGAAATGAGAGCACTAAAGAAAGCAATTATATTACTAATGG
ATTGAGCAATGTGGGTGGGAGTATTGAAAGCTACAACACCGAAACGGGAG
AATTTGTCTGGTATGTTTATGTCAATCCAAACCGTACCAATATTCCTTAT
GCGACCATGAATTTATGGGGATTTGGAAGGGCTCGTTCAAATACAAGCGA
CTTAGAAAACGACGCTAATACAAGTAGTGCTGAGCTTGGAGAGATTCAGG
TCTATGAAGTACCTGAAGGAGAAAAATTACCATCAAGTTATGGGGTTGAT
GTTACAAAACTTACTTTAAGAACGGATATCACAGCAGGCCTAGGAAATGG
TTTTCAAATGACCAAACGTCAGCGAATTGACTTTGGAAATAATATCCAAA
ATAAAGCATTTATCATCAAAGTAACAGGGAAAACAGACCAATCTGGTAAG
CCATTGGTTGTTCAATCCAATTTGGCAAGTTTTCGTGGTGCTTCTGAATA
TGCTGCTTTTACTCCAGTTGGAGGAAATGTCTACTTCCAAAACGAAATTG
CCTTGTCTCCTTCTAAGGGTAGTGGTTCTGGGAAAAGTGAATTTACTAAG
CCCTCTATTACAGTAGCAAATCTAAAACGAGTGGCTCAGCTTCGCTTTAA
GAAAATGTCAACTGACAATGTGCCATTGCCAGAAGCGGCTTTTGAGCTGC
GTTCATCAAATGGTAATAGTCAGAAATTAGAAGCCAGTTCAAACACACAA
GGAGAGGTTCACTTTAAGGACCTGACCTCGGGCACATATGACCTGTATGA
AACAAAAGCGCCAAAAGGTTATCAGCAGGTGACAGAGAAATTGGCGACCG
TTACTGTTGATACTACCAAACCTGCTGAGGAAATGGTCACTTGGGGAAGC
CCACATTCGTCTGTAAAAGTAGAAGCTAACAAAGAAGTCACGATTGTCAA
CCATAAAGAAACCCTTACGTTTTCAGGGAAGAAAATTTGGGAGAATGACA
GACCAGATCAACGCCCAGCAAAGATTCAAGTGCAACTGTTGCAAAATGGT
CAAAAGATGCCTAACCAGATTCAAGAAGTAACGAAGGATAACGATTGGTC
TTATCACTTCAAAGACTTGCCTAAGTACGATGCCAAGAATCAGGAGTATA
AGTACTCAGTTGAAGAAGTAAATGTTCCAGACGGCTACAAGGTGTCGTAT
TTAGGAAATGATATATTTAACACCAGAGAAACAGAATTTGTGTTTGAACA
GAATAACTTTAACCTTGAATTTGGAAATGCTGAAATAAAAGGTCAATCTG
GGTCAAAAATCATTGATGAAGACACGCTAACGTCTTTCAAAGGTAAGAAA
ATTTGGAAAAATGATACGGCAGAAAATCGTCCCCAAGCCATTCAAGTGCA
GCTTTATGCTGATGGAGTGGCTGTGGAAGGTCAAACCAAATTTATTTCTG
GCTCAGGTAATGAGTGGTCATTTGAGTTTAAAAACTTGAAGAAGTATAAT
GGAACAGGTAATGACATCATTTACTCAGTTAAAGAAGTAACTGTTCCAAC
AGGTTATGATGTGACTTACTCAGCTAATGATATTATTAATACCAAACGTG
AGGTTATTACACAACAAGGACCGAAACTAGAGATTGAAGAAACGCTTCCG
CTAGAATCAGGTGCTTCAGGCGGTACCACTACTGTCGAAGACTCACGCCC
AGTTGATACCTTATCAGGTTTATCAAGTGAGCAAGGTCAGTCCGGTGATA
TGACAATTGAAGAAGATAGTGCTACCCATATTAAATTCTCAAAACGTGAT
ATTGACGGCAAAGAGTTAGCTGGTGCAACTATGGAGTTGCGTGATTCATC
TGGTAAAACTATTAGTACATGGATTTCAGATGGACAAGTGAAAGATTTCT
ACCTGATGCCAGGAAAATATACATTTGTCGAAACCGCAGCACCAGACGGT
TATGAGATAGCAACTGCTATTACCTTTACAGTTAATGAGCAAGGTCAGGT
TACTGTAAATGGCAAAGCAACTAAAGGTGACACTCATATTGTCATGGTTG
ATGCTTACAAGCCAACTAAGGGTTCAGGTCAGGTTATTGATATTGAAGAA
AAGCTTCCAGACGAGCAAGGTCATTCTGGTTCAACTACTGAAATAGAAGA
CAGTAAATCTTCAGACCTTATCATTGGCGGTCAAGGTGAAGTTGTTGACA
CAACAGAAGACACACAAAGTGGTATGACGGGCCATTCTGGCTCAACTACT
GAAATAGAAGATAGCAAGTCTTCAGACGTTATCATTGGTGGTCAGGGGCA
GGTTGTCGAGACAACAGAGGATACCCAAACTGGCATGTACGGGGATTCTG
GTTGTAAAACGGAAGTCGAAGATACTAAACTAGTACAATCCTTCCACTTT
GATAACAAGGAACCAGAAAGTAACTCTGAGATTCCTAAAAAAGATAAGCC
AAAGAGTAATACTAGTTTACCAGCAACTGGTGAGAAGCAACATAATATGT
TCTTTTGGATGGTTACTTCTTGCTCACTTATTAGTAGTGTTTTTGTAATA
TCACTAAAATCCAAAAAACGCCTATCATCATGTTAA

SEQ ID NO: 121

MTQKNSYKLSFLLSLTFGILGLLLVFIGLSGVSVGHAETRNGANKQGSFE
IKKVDQNNKPLPGATFSLTSKDGKGTSVQTFTSNDKGIVDAQNLQPGTYT
LKEETAPDGYDKTSRTWTVTVYENGYTKLVENPYNGEIISKAGSKDVSSS
LQLENPKMSVVSKYGKTEVSSGAADFYRNHAAYFKMSFELKQKDKSETIN
PGDTFVLQLDRRLNPKGISQDIPKIIYDSANSPLAIGKYHAENHQLIYTF
TDYIAGLDKVQLSAELSLFLENKEVLENTSISNFKSTIGGQEITYKGTVN
0
VLYGNESTKESNYITNGLSNVGGSIESYNTETGEFVWYVYVNPNRTNIPY
ATMNLWGFGRARSNTSDLENDANTSSAELGEIQVYEVPEGEKIPSSYGVD
VTKLTLRTDITAGLGNGFQMTKRQRIDFGNNIQNKAFIIKVTGKTDQSGK
PLVVQSNLASFRGASEYAAFTPVGGNVYFQNEIALSPSKGSGSGKSEFTK
PSITVANLKRVAQLRFKKMSTDNVPLPEAAFELRSSNGNSQKLEASSNTQ
GEVHFKDLTSGTYDLYETKAPKGYQQVTEKLATVTVDTTKPAEEMVTWGS
PHSSVKVEANKEVTIVNHKETLTFSGKKIWENDRPDQRPAKIQVQLLQNG
QKMPNQIQEVTKDNDWSYHFKDLPKYDAKNQEYKYSVEEVNVPDGYKVSY
LGNDIFNTRETEFVFEQNNFNLEFGNAEIKGQSGSKIIDEDTLTSFKGKK
IWKNDTAENRPQAIQVQLYADGVAVEGQTKFISGSGNEWSFEFKNLKKYN
GTGNDIIYSVKEVTVPTGYDVTYSANDIINTKREVITQQGPKLEIEETLP
LESGASGGTTTVEDSRPVDTLSGLSSEQGQSGDMTIEEDSATHIKFSKRD
IDGKELAGATNELRDSSGKTISTWISDGQVKDFYLMPGKYTFVETAAPDG
YEIATAITFTVNEQGQVTVNGKATKGDTHIVMVDAYKPTKGSGQVIDIEE
KLPDEQGHSGSTTEIEDSKSSDLIIGGQGEVVDTTEDTQSGMTGHSGSTT
EIEDSKSSDVIIGGQGQVVETTEDTQTGMYGDSGCKTEVEDTKLVQSFHF
DNKEPESNSEIPKKDHPKSNTSLPATGEKQHNMFFWMVTSCSLISSVFVI
SLKSKPCRLSSC

[1109] 19224141 contains an amino acid motif indicative of a cell wall anchor: SEQ ID NO: 181 LPATG (shown in italics in SEQ ID NO: 121, above). In some recombinant host cell systems, it may be preferable to remove this motif to facilitate secretion of a recombinant 19224141 protein from the host cell. Alternatively, in other recombinant host cell systems, it may be preferable to use the cell wall anchor motif to anchor the recombinantly expressed protein to the cell wall. The extracellular domain of the expressed protein may be cleaved during purification or the recombinant protein may be left attached to either inactivated host cells or cell membranes in the final composition.

[1110] Two pilin motifs, discussed above, containing conserved lysine (K) residues have also been identified in 19224141. The pilin motif sequences are underlined in SEQ ID NO: 121, below. Conserved lysine (K) residues are also marked in bold, at amino acid residues 157 and 163 and at amino acid residues 216, 224, and 238. The pilin sequence, in particular the conserved lysine residues, are thought to be important for the formation of oligomeric, pilus-like structures. Preferred fragments of 19224141 include at least one conserved lysine residue. Preferably, fragments include at least one pilin sequence.

SEQ ID NO: 121

MTQKNSYKLSFLLSLTFGILGLLLVFIGLSGVSVGHAETRNGANKQGSFE
IKKVDQNNKPLPGATFSLTSKDGKGTSVQTFTSNDKGIVDAQNLQPGTYT
LKEETAPDGYDKTSRTWTVTVYENGYTKLVENPYNGEIISKAGSKDVSSS
LQLENPKMSVVSKYGKTEVSSGAADFYRNHAAYFKMSFELKQKDKSETIN
PGDTFVLQLDRRLNPKGISQDIPKIIYDSANSPLAIGKYHAENHQLIYTF
TDYIAGLDKVQLSAELSLFLENKEVLENTSISNFKSTIGGQEITYKGTVN
0
VLYGNESTKESNYITNGLSNVGGSIESYNTETGEFVWYVYVNPNRTNIPY
ATMNLWGFGRARSNTSDLENDANTSSAELGEIQVYEVPEGEKIPSSYGVD
VTKLTLRTDITAGLGNGFQMTKRQRIDFGNNIQNKAFIIKVTGKTDQSGK
PLVVQSNLASFRGASEYAAFTPVGGNVYFQNEIALSPSKGSGSGKSEFTK
PSITVANLKRVAQLRFKKMSTDNVPLPEAAFELRSSNGNSQKLEASSNTQ
GEVHFKDLTSGTYDLYETKAPKGYQQVTEKLATVTVDTTKPAEEMVTWGS
PHSSVKVEANKEVTIVNHKETLTFSGKKIWENDRPDQRPAKIQVQLLQNG
QKMPNQIQEVTKDNDWSYHFKDLPKYDAKNQEYKYSVEEVNVPDGYKVSY
LGNDIFNTRETEFVFEQNNFNLEFGNAEIKGQSGSKIIDEDTLTSFKGKK
IWKNDTAENRPQAIQVQLYADGVAVEGQTKFISGSGNEWSFEFKNLKKYN
GTGNDIIYSVKEVTVPTGYDVTYSANDIINTKREVITQQGPKLEIEETLP
LESGASGGTTTVEDSRPVDTLSGLSSEQGQSGDMTIEEDSATHIKFSKRD
IDGKELAGATNELRDSSGKTISTWISDGQVKDFYLMPGKYTFVETAAPDG
YEIATAITFTVNEQGQVTVNGKATKGDTHIVMVDAYKPTKGSGQVIDIEE
KLPDEQGHSGSTTEIEDSKSSDLIIGGQGEVVDTTEDTQSGMTGHSGSTT
EIEDSKSSDVIIGGQGQVVETTEDTQTGMYGDSGCKTEVEDTKLVQSFHF
DNKEPESNSEIPKKDHPKSNTSLPATGEKQHNMFFWMVTSCSLISSVFVI
SLKSKPCRLSSC

[1111] Two E boxes containing conserved glutamic residues have been identified in 19224141. The E-box motifs are underlined in SEQ ID NO: 121, below. The conserved glutamic acid (E) residues, at

[symbol]

glutamic acid residues, are thought to be important for the formation of oligomeric pilus-like structures of 19224141. Preferred fragments of 19224141 include at least one conserved glutamic acid residue. Preferably, fragments include at least one E box motif.

SEQ ID NO: 121

MTQKNSYKLSFLLSLTFGILGLLLVFIGLSGVSVGHAETRNGANKQGSFE
IKKVDQNNKPLPGATFSLTSKDGKGTSVQTFTSNDKGIVDAQNLQPGTYT
LKEETAPDGYDKTSRTWTVTVYENGYTKLVENPYNGEIISKAGSKDVSSS
LQLENPKMSVVSKYGKTEVSSGAADFYRNHAAYFKMSFELKQKDKSETIN
PGDTFVLQLDRRLNPKGISQDIPKIIYDSANSPLAIGKYHAENHQLIYTF
TDYIAGLDKVQLSAELSLFLENKEVLENTSISNFKSTIGGQEITYKGTVN
0
VLYGNESTKESNYITNGLSNVGGSIESYNTETGEFVWYVYVNPNRTNIPY
ATMNLWGFGRARSNTSDLENDANTSSAELGEIQVYEVPEGEKIPSSYGVD
VTKLTLRTDITAGLGNGFQMTKRQRIDFGNNIQNKAFIIKVTGKTDQSGK
PLVVQSNLASFRGASEYAAFTPVGGNVYFQNEIALSPSKGSGSGKSEFTK
PSITVANLKRVAQLRFKKMSTDNVPLPEAAFELRSSNGNSQKLEASSNTQ
GEVHFKDLTSGTYDLYETKAPKGYQQVTEKLATVTVDTTKPAEEMVTWGS
PHSSVKVEANKEVTIVNHKETLTFSGKKIWENDRPDQRPAKIQVQLLQNG
QKMPNQIQEVTKDNDWSYHFKDLPKYDAKNQEYKYSVEEVNVPDGYKVSY
LGNDIFNTRETEFVFEQNNFNLEFGNAEIKGQSGSKIIDEDTLTSFKGKK
IWKNDTAENRPQAIQVQLYADGVAVEGQTKFISGSGNEWSFEFKNLKKYN
GTGNDIIYSVKEVTVPTGYDVTYSANDIINTKREVITQQGPKLEIEETLP
LESGASGGTTTVEDSRPVDTLSGLSSEQGQSGDMTIEEDSATHIKFSKRD
IDGKELAGATNELRDSSGKTISTWISDGQVKDFYLMPGKYTFVETAAPDG
YEIATAITFTVNEQGQVTVNGKATKGDTHIVMVDAYKPTKGSGQVIDIEE
KLPDEQGHSGSTTEIEDSKSSDLIIGGQGEVVDTTEDTQSGMTGHSGSTT
EIEDSKSSDVIIGGQGQVVETTEDTQTGMYGDSGCKTEVEDTKLVQSFHF
DNKEPESNSEIPKKDHPKSNTSLPATGEKQHNMFFWMVTSCSLISSVFVI
SLKSKPCRLSSC

[1112] As discussed above, applicants have also determined the nucleotide and encoded amino acid sequence of fimbrial structural subunits in several other GAS AI-4 strains of bacteria. Examples of sequences of these fimbrial structural subunits are set forth below.

[1113] M12 strain isolate 20010296 is a GAS AI-4 strain of bacteria. 20010296_fimbrial is thought to be a fimbrial structural subunit of M12 strain isolate 20010296. An example of a nucleotide sequence encoding the 20010296_fimbrial protein (SEQ ID NO: 257) and a 20010296_fimbrial protein amino acid sequence (SEQ ID NO: 258) are set forth below.

SEQ ID NO: 257

agcagtggtcaattaacaataaaaaaatcaattacaaattttaatgatga
tacacttttgatgcctaagacagactatacttttagcgttaatccggata
gtgcggctacaggtactgaaagtaatttaccaattaaaccaggtattgct
gttaacaatcaagatattaaggtttcttattctaatactgataagacatc
aggtaaagaaaaacaagttgttgttgactttatgaaagttacttttccta
gcgttggtatttaccgttatgttgttaccgagaataaagggacagcagaa
ggagttacatatgatgatacaaaatggttagttgacgtctatgttggtaa
taatgaaaagggaggtcttgaaccaaagtatattgtatctaaaaaaggag
attctgctactaaagaaccaatccagtttaataattcattcgaaacaacg
tcattaaaaattgaaaaggaagttactggtaatacaggagatcataaaaa
agcatttaactttacattaacattgcaaccaaatgaatactatgaggcaa
gttcggttgtgaaaattgaagagaacggacaaacgaaagatgtgaaaatt
ggggaggcatataagtttactttgaacgatagtcagagtgtgatattgtc
taaattaccagttggtattaattataaagttgaagaagcagaagctaatc
aaggtggatatactacaacagcaactttaaaagatggagaaaagttatct
acttataacttaggtcaggaacataaaacagacaagactgctgatgaaat
cgt

SEQ ID NO: 258

SSGQLTIKKSITNFNDDTLLMPKTDYTFSVNPDSAATGTESNLPIKPGIA
VNNQDIKVSYSNTDKTSGKEKQVVVDFMKVTFPSVGIYRYVVTENKGTAE
GVTYDDTKWLVDVYVGNNEKGGLEPKYIVSKKGDSATKEPIQFNNSFETT
SLKIEKEVTGNTGDHKKAFNFTLTLQPNEYYEASSVVKIEENGQTKDVKI
GEAYKFTLNDSQSVILSKLPVGINYKVEEAEANQGGYTTTATLKDGEKLS
TYNLGQEHKTDKTADEIV

[symbol]

to be a fimbrial structural subunit of M12 strain isolate 20020069. An example of a nucleotide sequence encoding the 20020069_fimbrial protein (SEQ ID NO: 259) and a 20020069_fimbrial protein amino acid sequence (SEQ ID NO: 260) are set forth below.

SEQ ID NO: 259

agcagtggtcaattaacaataaaaaaatcaattacaaattttaatgatga
tacacttttgatgcctaagacagactatacttttagcgttaatccggata
gtgcggctacaggtactgaaagtaatttaccaattaaaccaggtattgct
gttaacaatcaagatattaaggtttcttattctaatactgataagacatc
aggtaaagaaaaacaagttgttgttgactttatgaaagttacttttccta
gcgttggtatttaccgttatgttgttaccgagaataaagggacagcagaa
ggagttacatatgatgatacaaaatggttagttgacgtctatgttggtaa
taatgaaaagggaggtcttgaaccaaagtatattgtatctaaaaaaggag
attctgctactaaagaaccaatccagtttaataattcattcgaaacaacg
tcattaaaaattgaaaaggaagttactggtaatacaggagatcataaaaa
agcatttaactttacattaacattgcaaccaaatgaatactatgaggcaa
gttcggttgtgaaaattgaagagaacggacaaacgaaagatgtgaaaatt
ggggaggcatataagtttactttgaacgatagtcagagtgtgatattgtc
taaattaccagttggtattaattataaagttgaagaagcagaagctaatc
aaggtggatatactacaacagcaactttaaaagatggagaaaagttatct
acttataacttaggtcaggaacataaaacagacaagactgctgatgaaat
cgt

SEQ ID NO: 260

SSGQLTIKKSITNFWDDTLLMPKTDYTFSVNPDSAATGTESNLPIKPGIA
VNNQDIKVSYSNTDKTSGKEKQVVVDFMKVTFPSVGIYRYVVTENKGTAE
GVTYDDTKWLVDVYVGNNEKGGLEPKYIVSKKGDSATKEPIQFNNSFETT
SLKIEKEVTGNTGDHKKAFNFTLTLQPNEYYEASSVVKIEENGQTKDVKI
GEAYKFTLNDSQSVILSKLPVGINYKVEEAEANQGGYTTTATLKDGEKLS
TYNLGQEHKTDKTADEIV

[1114] M12 strain isolate CDC SS 635 is a GAS AI-4 strain of bacteria. CDC SS 635_fimbrial is thought to be a fimbrial structural subunit of M12 strain isolate CDC SS 635. An example of a nucleotide sequence encoding the CDC SS 635_fimbrial protein (SEQ ED NO: 261) and a CDC SS 635_fimbrial protein amino acid sequence (SEQ ID NO: 262) are set forth below.

SEQ ID NO: 261
gagacggcaggggttgttagcagtggtcaattaacaataaaaaaatcaattacaaatttt
aatgatgatacacttttgatgcctaagacagactatacttttagcgttaatccggatagt
gcggctacaggtactgaaagtaatttaccaattaaaccaggtattgctgttaacaatcaa
gatattaaggtttcttattctaatactgataagacatcaggtaaagaaaaacaagttgtt
gttgactttatgaaagttacttttcctagcgttggtatttaccgttatgttgttaccgag
aataaagggacagcagaaggagttacatatgatgatacaaaatggttagttgacgtctat
gttggtaataatgaaaagggaggtcttgaaccaaagtatattgtatctaaaaaaggagat
tctgctactaaagaaccaatccagtttaataattcattcgaaacaacgtcattaaaaatt
gaaaaggaagttactggtaatacaggagatcataaaaaagcatttaactttacattaaca
ttgcaaccaaatgaatactatgaggcaagttcggttgtgaaaattgaagaqaacggacaa
acgaaagatgtgaaaattggggaggcatataagtttactttgaacgatagtcagagtgtg
atattgtctaaattaccagttggtattaattataaagttgaagaagcagaagctaatcaa
ggtggatatactacaacagcaactttaaaagatggagaaaagttatctacttataactta
ggtcaggaacataaaacagacaagactgctgatgaaatcgttgtcacaaataaccgtgac
act
SEQ ID NO: 262
ETAGVVSSGQLTIKKSITNFNDDTLLMPKTDYTFSVNPDSAATGTESNLPIKPGIAVNNQ
DIKVSYSNTDKTSGKEKQVVVDFMKVTFPSVGIYRYVVTENKGTAEGVTYDDTKWLVDVY
VGNNEKGGLEPKYIVSKKGDSATKEPIQFNNSFETTSLKIEKEVTGNTGDHKKAFNFTLT
LQPNEYYEASSVVKIEENGQTKDVKIGEAYKFTLNDSQSVILSKLPVGINYKVEEAEANQ
GGYTTTATLKDGEKLSTYNLGQEHKTDKTADEIVVTNNRDT

[symbol]

be a fimbrial structural subunit of M5 strain isolate ISS 4883. An example of a nucleotide sequence encoding the ISS4883_fimbrial protein (SEQ ID NO: 265) and an ISS4883_fimbrial protein amino acid sequence (SEQ ID NO: 266) are set forth below.

SEQ ID NO: 265
gagacggcaggggttgtaacaggaaaatcactacaagttacaaagacaatgacttatgat
gatgaagaggtgttaatgcccgaaaccgcctttacttttactatagagcctgatatgact
gcaagtggaaaagaaggcgacctagatattaaaaatqgaattgtagaaggcttagacaaa
caagtaacagtaaaatataagaatacagataaaacatctcaaaaaactaaaatagcacaa
tttgatttttctaaggttaaatttccagctataggtgtttaccgctatatggtttcagag
aaaaacgataaaaaagacggaattaggtacgatgataaaaagtggactgtagatgtttat
gttgggaataaggccaataacgaagaaggtttcgaagttctatatattgtatcaaaagaa
ggtacttctagtactaaaaaaccaattgaatttacaaactctattaaaactacttcctta
aaaattgaaaaacaaataactggcaatgcaggagatcgtaaaaaatcattcaacttcaca
ttaacattacaaccaagtgaatattataaaaccggatcagttgtgaaaatcgaacaggat
ggaagtaaaaaagatgtgacgataggaacgccttacaaatttactttgggacacggtaag
agtgtcatgttatcgaaattaccaattggtatcaattactatcttagtgaagacgaagcg
aataaagacggttacactacaacggcaacattaaaagaacaaggcaaagaaaagagttcc
gatttcactttgagtactcaaaaccagaaaacagacgaatctgctgacgaaatcgttgtc
acaaataagcgtgacactctcgag
SEQ ID NO: 266
ETAGVVTGKSLQVTKTMTYDDEEVLMPETAFTFTIEPDMTASGKEGDLDIKNGIVEGLDK
QVTVKYKNTDKTSQKTKIAQFDFSKVKFPAIGVYRYMVSEKNDKKDGIRYDDKKWTVDVY
VGNKANNEEGFEVLYIVSKEGTSSTKKPIEFTNSIKTTSLKIEKQITGNAGDRKKSFNFT
LTLQPSEYYKTGSVVKIEQDGSKKDVTIGTPYKFTLGHGKSVMLSKLPIGINYYLSEDEA
NKDGYTTTATLKEQGKEKSSDFTLSTQNQKTDESADEIVVTNKRDTLE

[1115] M50 strain isolate ISS4538 is a GAS AI-4 strain of bacteria. ISS4538_fimbrial is thought to be a fimbrial structural subunit of M50 strain ISS 4538. An example of a nucleotide sequence encoding the ISS4538_fimbrial protein (SEQ ID NO: 255) and an ISS4538_fimbrial protein amino acid sequence (SEQ ID NO: 256) are set forth below.

SEQ ID NO: 255
atgaaaaaaaataaattattacttgctactgcaatcttagcaactgctttaggaacagct
tctttaaatcaaaacgtaaaagctgagacggcaggggttgttagcagtggtcaattaaca
ataaaaaaatcaattacaaattttaatgatgatacacttttgatgcctaagacagactat
acttttagcgttaatccggatagtgcggctacaggtactgaaagtaatttaccaattaaa
ccaggtattgctgttaacaatcaagatattaaggtttcttattctaatactgataagaca
tcaggtaaagaaaaacaagttgttgttgactttatgaaagttacttttcctagcgttggt
atttaccgttatgttgttaccgagaataaagggacagcagaaggagttacatatgatgat
acaaaatggttagttgacgtctatgttggtaataatgaaaagggaggtcttgaaccaaag
tatattgtatctaaaaaaggagattctgctactaaaqaaccaatccagtttaataattca
ttcgaaacaacgtcattaaaaattgaaaagaaagttactggtaatacaggagatcataaa
aaagcatttaactttacattaacattgcaaccaaatgaatactatgaggcaagttcggtt
gtgaaaattgaagagaacggacaaacgaaagatgtgaaaattggggaggcatataagttt
actttgaacgatagtcagagtgtgatattgtctaaattaccagttggtattaattataaa
gttgaagaagcagaagctaatcaaggtggatatactacaacagcaactttaaaagatgga
gaaaagttatctacttataacttaggtcaggaacataaaacagacaagactgctgatgaa
atcgttgtcacaaataancgngacactcnagttccaacnggtgtngtaggcaccccncct
ccattcncagttcttancattgnggctantggtggngtnatntatnttacaaaacgnaaa
aaagnataa

SEQ ID NO: 256

MKKNKLLLATAILATALGTASLNQNVKAETAGVVSSGQLTIKKSITNFNDDTLLMPKTDY
TFSVNPDSAATGTESNLPIKPGIAVNNQDIKVSYSNTDKTSGKEKQVVVDFMKVTFPSVG
IYRYVVTENKGTAEGVTYDDTKWLVDVYVGNNEKGGLEPKYIVSKKGDSATKEPIQFNNS
FETTSLKIEKKVTGNTGDHKKAFNFTLTLQPNEYYEASSVVKIEENGQTKDVKIGEAYKF
TLNDSQSVILSKLPVGINYKVEEAEANQGGYTTTATLKDGEKLSTYNLGQEHKTDKTADE
IVVTNXRDTXVPTGVVGTPPPFXVLXIXAXGGVXYXTKRKKX

[1116] There may be an upper limit to the number of GAS proteins which will be in the compositions of the invention. Preferably, the number of GAS proteins in a composition of the invention is less than 20, less than 19, less than 18, less than 17, less than 16, less than 15, less than 14, less than 13, less than 12, less than 11, less than 10, less than 9, less than 8, less than 7, less than 6, less than 5, less than 4, or less than 3. Still more preferably, the number of GAS proteins in a composition of the invention is less than 6, less than 5, or less than 4. Still more preferably, the number of GAS proteins in a composition of the invention is 3.

[1117] The GAS proteins and polynucleotides used in the invention are preferably isolated, i.e., separate and discrete, from the whole organism with which the molecule is found in nature or, when the polynucleotide or polypeptide is not found in nature, is sufficiently free of other biological macromolecules so that the polynucleotide or polypeptide can be used for its intended purpose.

### Examples Other Gram Positive Bacterial Adhesin Island Sequences

[1118] The Gram positive bacteria AI polypeptides of the invention can, of course, be prepared by various means (e.g. recombinant expression, purification from a gram positive bacteria, chemical synthesis etc.) and in various forms (e.g. native, fusions, glycosylated, non-glycosylated etc.). They are preferably prepared in substantially pure form (i.e. substantially free from other streptococcal or host cell proteins) or substantially isolated form.

[1119] The Gram positive bacteria AI proteins of the invention may include polypeptide sequences having sequence identity to the identified Gram positive bacteria proteins. The degree of sequence identity may vary depending on the amino acid sequence (a) in question, but is preferably greater than 50% (e.g. 60%, 65%, 70%, 75%, 80%, 85%, 90%, 91%, 92%, 93%, 94%, 95%, 96%, 97%, 98%, 99%, 99.5% or more). Polypeptides having sequence identity include homologs, orthologs, allelic variants and mutants of the identified Gram positive bacteria proteins. Typically, 50% identity or more between two proteins is considered to be an indication of functional equivalence. Identity between proteins is preferably determined by the Smith-Waterman homology search algorithm as implemented in the MPSRCH program (Oxford Molecular), using an affinity gap search with parameters gap open penalty=12 and gap extension penalty=1.

[1120] The Gram positive bacteria adhesin island polynucleotide sequences may include polynucleotide sequences having sequence identity to the identified Gram positive bacteria adhesin island polynucleotide sequences. The degree of sequence identity may vary depending on the polynucleotide sequence in question, but is preferably greater than 50% (e.g. 60%, 65%, 70%, 75%, 80%, 85%, 90%, 91%, 92%, 93%, 94%, 95%, 96%, 97%, 98%, 99%, 99.5% or more).

[symbol]

include polynucleotide fragments of the identified adhesin island sequences. The length of the fragment may vary depending on the polynucleotide sequence of the specific adhesin island sequence, but the fragment is preferably at least 10 consecutive polynucleotides, (e.g. at least 10, 12, 14, 16, 18, 20, 25, 30, 35, 40, 50, 60, 70, 80, 90, 100, 150, 200 or more).

[1121] The Gram positive bacteria adhesin island amino acid sequences of the invention may include polypeptide fragments of the identified Gram positive bacteria proteins. The length of the fragment may vary depending on the amino acid sequence of the specific Gram positive bacteria antigen, but the fragment is preferably at least 7 consecutive amino acids, (e.g. 8, 10, 12, 14, 16, 18, 20, 25, 30, 35, 40, 50, 60, 70, 80, 90, 100, 150, 200 or more). Preferably the fragment comprises one or more epitopes from the sequence. The fragment may comprise at least one T-cell or, preferably, a B-cell epitope of the sequence. T- and B-cell epitopes can be identified empirically (e.g., using PEPSCAN [Geysen et al. (1984) PNAS USA 81:3998-4002; Carter (1994) Methods Mol. Biol. 36:207-223, or similar methods], or they can be predicted (e.g., using the Jameson-Wolf antigenic index [Jameson, B A et al. 1988, CABIOS 4(1):1818-186], matrix-based approaches [Raddrizzani and Hammer (2000) Brief Bioinform. 1(2): 179-189], TEPITOPE [De Lalla et al. (199) J. Immunol. 163:1725-1729], neural networks [Brusic et al. (1998) Bioinformatics 14(2):121-130], OptiMer & EpiMer [Meister et al. (1995) Vaccine 13(6):581-591; Roberts et al. (1996) AIDS Res. Hum. Retroviruses 12(7):593-610], ADEPT [Maksyutov & Zagrebelnaya (1993) Comput. Appl. Biosci. 9(3):291-297], Tsites [Feller & de la Cruz (1991) Nature 349(6311):720-721], hydrophilicity [Hopp (1993) Peptide Research 6:183-190], antigenic index [Welling et al. (1985) FEBS Lett. 188:215-218] or the methods disclosed in Davenport et al. (1995) Immunogenetics 42:392-297, etc. Other preferred fragments include (1) the N-terminal signal peptides of each identified Gram positive bacteria protein, (2) the identified Gram positive bacteria protein without their N-terminal signal peptides, (3) each identified Gram positive bacteria protein wherein up to 10 amino acid residues (e.g. 1, 2, 3, 4, 5, 6, 7, 8, 9, 10, 15, 20, 25 or more) are deleted from the N-terminus and/or the C-terminus e.g. the N-terminal amino acid residue may be deleted. Other fragments omit one or more domains of the protein (e.g. omission of a signal peptide, of a cytoplasmic domain, of a transmembrane domain, or of an extracellular domain), and (4) the polypeptides, but without their N-terminal amino acid residue.

[1122] As indicated in the above text, nucleic acids and polypeptides of the invention may include sequences that:
[1123] (a) are identical (i.e., 100% identical) to the sequences disclosed in the sequence listing;
[1124] (b) share sequence identity with the sequences disclosed in the sequence listing;
[1125] (c) have 1, 2, 3, 4, 5, 6, 7, 8, 9, or 10 single nucleotide or amino acid alterations (deletions, insertions, substitutions), which may be at separate locations or may be contiguous, as compared to the sequences of (a) or (b);
[1126] (d) when aligned with a particular sequence from the sequence listing using a pairwise alignment algorithm, a moving window of x monomers (amino acids or nucleotides) [symbol]
   that extends top monomers (where p>x) there are p−x+1 such windows, each window has at least x·y identical aligned monomers, where: x is selected from 20, 25, 30, 35, 40, 45, 50, 60, 70, 80, 90, 100, 150, 200; y is selected from 0.50, 0.60, 0.70, 0.75, 0.80, 0.85, 0.90, 0.91, 0.92, 0.93, 0.94, 0.95, 0.96, 0.97, 0.98, 0.99; and if x·y is not an integer then it is rounded up to the nearest integer. The preferred pairwise alignment algorithm is the Needleman-Wunsch global alignment algorithm [Needleman &Wunsch (1970) J. Mol. Biol. 48, 443-453], using default parameters (e.g., with Gap opening penalty=10.0, and with Gap extension penalty=0.5, using the EBLOSUM62 scoring matrix). This algorithm is conveniently implemented in the needle tool in the EMBOSS package [Rice et al. (2000) Trends Genet. 16:276-277].

[1127] The nucleic acids and polypeptides of the invention may additionally have further sequences to the N-terminus/5′ and/or C-terminus/3′ of these sequences (a) to (d).

[1128] All of the Gram positive bacterial sequences referenced herein are publicly available through PubMed on GenBank.

Streptococcus pneumoniae Adhesin Island Sequences

[1129] As discussed above, a S. pneumoniae AI sequence is present in the TIGR4 S. pneumoniae genome. Examples of S. pneumoniae AI sequences are set forth below.

[1130] SrtD (Sp0468) is a sortase. An example of an amino acid sequence of SrtD is set forth in SEQ ID NO: 80.

SEQ ID NO: 80
MSRTKLRALLGYLLMLVACLIPIYCFGQMVLQSLGQVKGHATFVKSMTTEMYQEQQNHSL
AYNQRLASQNRIVDPFLAEGYEVNYQVSDDPDAVYGYLSIPSLEIMEPVYLGADYHHLGM
GLAHVDGTPLPLDGTGIRSVIAGHRAEPSHVFFRHLDQLKVGDALYYDNGQEIVEYQMMD
TEIILPSEWEKLESVSSKNIMTLITCDPIPTFNKRLLVNFERVAVYQKSDPQTAAVARVA
FTKEGQSVSRVATSQWLYRGLVVLAFLGILFVLWKLARLLRGK

[1131] SrtC (Sp0467) is a sortase. An example of an amino acid sequence of SrtC is set forth in SEQ ID NO: 81.

SEQ ID NO: 81
MSRYYYRIESNEVIKEFDETVSQMDKAELEERWRLAQAFNATLKPSEILDPFTEQEKKKG
VSEYANMLKVHERIGYVEIPAIDQEIPMYVGTSEDILQKGAGLLEGASLPVGGENTHTVI
TAHRGLPTAELFSQLDKMKKGDIFYLHVLDQVLAYQVDQIVTVEPNDFEPVLIQHGEDYA
TLLTCTPYMINSHRLLVRGKRIPYTAPIAERNRAVRERGQFWLWLLLGAMAVILLLLYRV
YRNRRIVKGLEKQLEGRHVKD

[1132] SrtB (SP0466) is a sortase. An example of an amino acid sequence of SrtB is set forth in SEQ ID NO: 82.

SEQ ID NO: 82
MAVMAYPLVSRLYYRVESNQQIADFDKEKATLDEADIDERMKLAQAFNDSLNNVVSGDPW
SEEMKKKGRAEYARMLEIHERMGHVEIPVIDVDLPVYAGTAEEVLQQGAGHLEGTSLPIG
GNSTHAVITAHTGLPTAKMFTDLTKLKVGDKFYVHNIKEVMAYQVDQVKVIEPTNFDDLL
IVPGHDYVTLLTCTPYMINTHRLLVRGHRIPYVAEVEEEFIAANKLSHLYRYLFYVAVGL
IVILLWIIRRLRKKKKQPEKALKALKAARKEVKVEDGQQ

[1133] Sp0465 is a hypothetical protein. An example of an amino acid sequence of Sp0465 is set forth in SEQ ID NO: 83.

SEQ ID NO: 83

MFLPFLSASLYLQTHHFIAFPNRQSYLLRETRKSHFFLIHHPF

[1134] RrgC (SP0464) is a cell wall surface anchor family protein. RrgC contains a sortase substrate motif VPXTG (SEQ ID NO: 137), shown in italics in SEQ ID NO: 84.

SEQ ID NO: 84
MISRIFFVMALCFSLVWGAHAVQAQEDHTLVLQLENYQEVVSQLPSRDGHRLQVWKLDDS
YSYDDRVQIVRDLHSWDENKLSSFKKTSFEMTFLENQIEVSHIPNGLYYVRSIIQTDAVS
YPAEFLFEMTDQTVEPLVIVAKKTDTMTTKVKLIKVDQDHNRLEGVGFKLVSVARDVSEK
EVPLIGEYRYSSSGQVGRTLYTDKNGEIFVTNLPLGNYRFKEVEPLAGYAVTTLDTDVQL
VDHQLVTITVVNQKLPRGNVDFMKVDGRTNTSLQGAMFKVMKEESGHYTPVLQNGKEVVV
TSGKDGRFRVEGLEYGTYYLWELQAPTGYVQLTSPVSFTIGKDTRKELVTVVKNNKRPRI
DVPDTGEETLYILMLVAILLFGSGYYLTKKPNN

[1135] RrgB (Sp0463) is a cell wall surface anchor protein. RrgB contains a sortase substrate motif IPXTG (SEQ ID NO: 133), shown in italics in SEQ ID NO: 85.

SEQ ID NO: 85
MKSINKFLTMLAALLLTASSLFSAATVFAAGTTTTSVTVHKLLATDGDMDKIANELETGN
YAGNKVGVLPANAKEIAGVMFVWTNTNNEIIDENGQTLGVNIDPQTFKLSGAMPATAMKK
LTEAEGAKFNTANLPAAKYKIYEIHSLSTYVGEDGATLTGSKAVPIEIELPLNDVVDAHV
YPKNTEAKPKIDKDFKGKANPDTPRVDKDTPVNHQVGDVVEYEIVTKIPALANYATANWS
DRMTEGLAFNKGTVKVTVDDVALEAGDYALTEVATGFDLKLTDAGLAKVNDQNAEKTVKI
TYSATLNDKAIVEVPESNDVTFNYGNNPDHGNTPKPNKPNENGDLTLTKTWVDATGAPIP
AGAEATFDLVNAQTGKVVQTVTLTTDKNTVTVNGLDKNTEYKFVERSIKGYSADYQEITT
AGEIAVKNWKDENPKPLDPTEPKVVTYGKKFVKVNDKDNRLAGAEFVIANADNAGQYLAR
KADKVSQEEKQLVVTTKDALDRAVAAYNALTAQQQTQQEKEKVDKAQAAYNAAVIAANNA
FEWVADKDNENVVKLVSDAQGRFEITGLLAGTYYLEETKQPAGYALLTSRQKFEVTATSY
SATGQGIEYTAGSGKDDATKVVNKKITIPQTGGIGTIIFAVAGAAIMGIAVYAYVKNNKD
EDQLA

[1136] RrgA (Sp0462) is a cell wall surface anchor protein. RrgA contains a sortase substrate motif YPXTG (SEQ ID NO: 186), indicated in italics in SEQ ID NO: 86.

SEQ ID NO: 86
MLNRETHMKKVRKIFQKAVAGLCCISQLTAFSSIVALAETPETSPAIGKVVIKETGEGGA
LLGDAVFELKNNTDGTTVSQRTEAQTGEAIFSNIKPGTYTLTEAQPPVGYKPSTKQWTVE
VEKNGRTTVQGEQVENREEALSDQYPQTGTYPDVQTPYQIIKVDGSEKNGQHKALNPNPY
ERVIPEGTLSKRIYQVNNLDDNQYGIELTVSGKTVYEQKDKSVPLDVVILLDNSNSMSNI
RNKNARRAERAGEATRSLIDKITSDSENRVALVTYASTIFDGTEFTVEKGVADKNGKRLN
DSLFWNYDQTSFTTNTKDYSYLKLTNDKNDIVELKNKVPTEAEDHDGNRLMYQFGATFTQ
KALMKADEILTQQARQNSQKVIFHITDGVPTMSYPINFNHATFAPSYQNQLNAFFSKSPN
KDGILLSDFITQATSGEHTIVRGDGQSYQMFTDKTVYEKGAPAAFPVKPEKYSEMKAAGY
AVIGDPINGGYIWLNWRESILAYPFNSNTAKITNHGDPTRWYYNGNIAPDGYDVFTVGIG
INGDPGTDEATATSFMQSISSKPENYTNVTDTTKILEQLNRYFHTIVTEKKSIENGTITD
PMGELIDLQLGTDGRFDPADYTLTANDGSRLENGQAVGGPQNDGGLLKNAKVLYDTTEKR
IRVTGLYLGTDEKVTLTYNVRLNDEFVSNKFYDTNGRTTLHPKEVEQNTVRDFPIPKIRD
VRKYPEITISKEKKLGDIEFIKVNKNDKKPLRGAVFSLQKQHPDYPDIYGAIDQNGTYQN
VRTGEDGKLTFKNLSDGKYRLFENSEPAGYKPVQNKPIVAFQIVNGEVRDVTSIVPQDIP
AGYEFTNDKHYITNEPIPPKREYPRTGGIMLPFYLIGCMMMGGVLLYTRKHP

[1137] RlrA (Sp0461) is a transcriptional regulator. An example of an amino acid sequence for RlrA is set forth in SEQ ID NO: 87.

SEQ ID NO: 87
MLNKYIEKRITDKITILNILLDIRSIELDELSTLTSLQSKSLLSILQELQETFEEELTFN
LDTQQVQLIEHHSHQTNYYFHQLYNQSTILKILRFFLLQGNQSFNEFTQKEYISIATGYR
VRQKCGLLLRSVGLDLVKNQVVGPEYRIRFLIALLQFHFGIEIYDLNDGSMDWVTHMIVQ
SNSQLSHELLEITPDEYVHFSILVALTWKRREFPLEFPESKEFEKLKNLFMYPILMEHCQ
TYLEPHANMTFTQEELDYIFLVYCSANSSFSKDKWWQEKKTHTIQLILQHTRGKHLLSKF
KNILGNDISNSLSFLTALTFLTRTFLFGLQNLVPYYNYYEHYGIESDKPLYHISKAIVQE
WMTEQKIEGVIDQHRLYLFSLYLTETIFSSLPAIPIFIILNNQADVNLIKSIILRNFTDK
VASVTGYNILISPPPSEEHLTEPLIIITTKEYLPYVKKQYPKGKHHFLTIALDLHVSQQR
LIYQTIVDIRKEAFDKRVAMIAKKAHYLL

[1138] As discussed above, a S. pneumoniae AI sequence is present in the S. pneumoniae strain 670 genome. Examples of S. pneumoniae AI sequences are set forth below.

[symbol]

### SEQ ID NO: 171.

SEQ ID NO: 171
MEHINHTTLLIGIKDKNITLNKAIQHDTHIEVFATLDYHPPKCKHCKGKQIKYDFQKPSK
IPFIEIGGFPSLIHLKKRRFQCKSCRKVTVAETTLVQKNCQISEMVRQKIAQLLLNREAL
THIASKLAISTSTSTVYRKLKQFHFQEDYTTLPEILSWDEFSYQKGKLAFIAQDFNTKKI
MTILDNRRQTTIRNHFFKYSKEARKKVKVVTVDMSGSYIPLIKKLFPNAKIVLDRFHIVQ
HMSRALNQTRINIMKQFDDKSLEYRALKYYWKFILKDSRKLSLKPFYARTFRETLTPREC
LKKIFTLVPELKDYYDLYQLLLFHLQEKNTDQFWGLIQDTLPHLNRTFKTTLSTFICYKN
YITNAIELPYSNAKLEATNKLIKDIKRNAFGFRNFENFKKRIFIALNIKKERTKFVLSRA

[1140] Orf2_{—}670 is a transcriptional regulator. An example of an amino acid sequence of Orf2_{—}670 is set forth in SEQ ID NO: 172.

SEQ ID NO: 172
MLNKYIEKRITDKITILNILLDIRSIELDELSTLTSLQSKSLLSILQELQETFEEELTFN
LDTQQVQLIEHHSHQTNYYFHQLYNQSTILKILRFFLLQGNQSFNEFTQKEYISIATGYR
VRQKCGLLLRSVGLDLVKNQVVGPEYRIRFLIALLQFHFGIEIYDLNDGSMDWVTHMIVQ
SNSQLSHELLEITPDEYVRFSILVALTWKRREFPLEFPESKEFEKLKNLFMYPILMEHCQ
TYLEPHANMTFTQEELDYIFLVYCSANSSFSKDKWNQEKKTHTIQLILQHTRGKHLLSKF
KNILGNDISNSLSFLTALTFLTRTFLFGLQNLVPYYNYYEHYGIESDKPLYHISKAIVQE
WMTEQKIEGVIDQHRLYLFSLYLTETIFSSLPAIPIFIILNNQADVNLIKSIILRNFTDK
VASVTGYNILISPPPSEEHLTEPLIIITTKEYLPYVKKQYPKGKHHFLTIALDLHVSQQR
LIYQTIVDIRKEAFDKRVAMIAKKAHYLL

[1141] Orf3_{—}670 is a cell wall surface anchor family protein. An example of an amino acid sequence of Orf3_{—}670 is set forth in SEQ ID NO: 173.

SEQ ID NO: 173
MLNRETHMKKVRKIFQKAVAGLCCISQLTAFSSIVALAETPETSPAIGKVVIKETGEGGA
LLGDAVFELKNNTDGTTVSQRTEAQTGEAIFSNIKPGTYTLTEAQPPVGYKPSTKQWTVE
VEKNGRTTVQGEQVENREEALSDQYPQTGTYPDVQTPYQIIKVDGSEKNGQHKALNPNPY
ERVIPEGTLSKRIYQVNNLDDNQYGIELTVSGKTTVETKEASTPLDVVILLDNSNSMSNI
RHNHAHRAEKAGEATRALVDKITSNPDNRVALVTYGSTIFDGSEATVEKGVADANGKILN
DSALWTFDRTTFTAKTYNYSFLNLTSDPTDIQTIKDRIPSDAEELNKDKLMYQFGATFTQ
KALMTADDILTKQARPNSKKVIFHITDGVPTMSYPINFKYTGTTQSYRTQLNNFKAKTPN
SSGILLEDFVTWSADGEHKIVRGDGESYQMFTKKPVTDQYGVHQILSITSMEQRAKLVSA
GYRFYGTDLYLYWRDSILAYPFNSSTDWITNHGDPTTWYYNGNMAQDGYDVFTVGVGVNG
DPGTDEATATRFMQSISSSPDNYTNVADPSQILQELNRYFYTIVNEKKSIENGTITDPMG
ELIDFQLGADGRFDPADYTLTANDGSSLVNNVPTGGPQNDGGLLKNAKVFYDTTEKRIRV
TGKYLGTGEKVTLTYNVRLNDQFVSNKFYDTNGRTTLHPKEVEKNTVRDFPIPKIRDVRK
YPEITIPKEKKLGEIEFIKINKNDKKPLRDAVFSLQKQHPDYPDIYGAIDQNGTYQNVRT
GEDGKLTFKNLSDGKYRLFENSEPAGYKPVQNKPIVAFQIVNGEVRDVTSIVPQDIPAGY
EFTNDKHYITNEPIPPKREYPRTGGIGMLPFYLIGCMMMGGVLLYTRKHP

[1142] Orf4_{—}670 is a cell wall surface anchor family protein. An example of an amino acid sequence of orf4_{—}670 is set forth in SEQ ID NO: 174.

SEQ ID NO: 174
MKSINKFLTMLAALLLTASSLFSAATVFAADNVSTAPDAVTKTLTIHKLLLSEDDLKTWD
TNGPKGYDGTQSSLKDLTGVVAEEIPNVYFELQKYNLTDGKEKENLKDDSKWTTVHGGLT
TKDGLKIETSTLKGVYRIREDRTKTTYVGPNGQVLTGSKAVPALVTLPLVNNNGTVIDAH
VFPKNSYNKPVVDKRIADTLNYNDQNGLSIGTKIPYVVNTTIPSNATFATSFWSDEMTEG
LTYNEDVTITLNNVAMDQADYEVTKGNNGFNLKLTEAGLAKINGKDADQKIQITYSATLN
SLAVADIPESNDITYHYGNHQDHGNTPKPTKPNNGQITVTKTWDSQPAPEGVKATVQLVN
AKTGEKVGAPVELSENNWTYTWSGLDNSIEYKVEEEYNGYSAEYTVESKGKLGVKNWKDN
NPAPINPEEPRVKTYGKKFVKVDQKDTRLENAQFVVKKADSNKYIAFKSTAQQAADEKAA
ATAKQKLDAAVAAYTNAADKQAAQALVDQAQQRYNVAYKEAKFGYVEVAGKDEAMVLTSN
TDGQFQISGLAAGTYKLEEIKAPEGFAKIDDVEFVVGAGSWNQGEFNYLKDVQKNDATKV
VNKKITIPQTGGIGTIIFAVAGAAIMGIAVYAYVKNNKDEDQLA

[1143] Orf5_{—}670 is a cell wall surface anchor family protein. An example of an amino acid sequence of orf5_{—}670 is set forth in SEQ ID NO: 175.

SEQ ID NO: 175
MTMQKMQKMISRIFFVMALCFSLVWGAHAVQAQEDHTLVLQLENYQEVVSQLPSRDGHRLQVWKLDDSYSYDDRV
QIVRDLHSWDENKLSSFKKTSFEMTFLENQIEVSHIPNGLYYVRSIIQTDAVSYPAEFLFEMTDQTVEPLVIVAK
KTDTMTTKVKLIKVDQDHNRLEGVGFKLVSVARDGSEKEVPLIGEYRYSSSGQVGRTLYTDKNGEIFVTNLPLGN
YRFKEVEPLAGYAVTTLDTDVQLVDHQLVTITVVNQKLPRGNVDFMKVDGRTNTSLQGAMFKVMKEESGHYTPVL
QNGKEVVVTSGKDGRFRVEGLEYGTYYLWELQAPTGYVQLTSPVSFTIGKDTRKELVTVVKNNKRPRIDVPDTGE
ETLYILMLVAILLFGSGYYLTKKPNN

[1144] Orf6_{—}670 is a sortase. An example of an amino acid sequence of orf6_{—}670 is set forth in SEQ ID NO: 176.

SEQ ID NO: 176
MLIKMVKTKKQKRNNLLLGVVFFIGMAVMAYPLVSRLYYRVESNQQIADFDKEKATLDEADIDERMKLAQAFNDS
LNNVVSGDPWSEEMKKKGRAEYARMLEIHERMGHVEIPVIDVDLPVYAGTAEEVLQQGAGHLEGTSLPIGGNSTH
AVITAHTGLPTAKMFTDLTKLKVGDKFYVHNIKEVMAYQVDQVKVIEPTNFDDLLIVPGHDYVTLLTCTPYMINT
HRLLVRGHRIPYVAEVEEEFIAANKLSHLYRYLFYVAVGLIVILLWIIRRLRKKKKQPEKALKALKAARKEVKVE
DGQQ

[1145] Orf7_{—}670 is a sortase. An example of an amino acid sequence of orf7_{—}670 is set forth in SEQ ID NO: 177.

SEQ ID NO: 177
VSRYYYRIESNEVIKEFDETVSQMDKAELEERWRLAQAFNATLKPSEILDPFTEQEKKKGVSEYANMLKVHERIG
YVEIPAIDQEIPMYVGTSEEILQKGAGLLEGASLPVGGENTHTVVTAHRGLPTAELFSQLDKMKKGDVFYLHVLD
QVLAYQVDQILTVEPNDFEPVLIQHGEDYATLLTCTPYMINSHRLLVRGKRIPYTAPIAERNRAVRERGQFWLWL
LLAALVMILVLSYGVYRHRRIVKGLEKQLEEHHVKG

[1146] Orf8_{—}670 is a sortase. An example of an amino acid sequence of orf8_{—}670 is set forth in SEQ ID NO: 178.

SEQ ID NO: 178
MSKAKLQKLLGYLLMLVALVIPVYCFGQMVLQSLGQVKGHEIFSESVTADSYQEQLQRSLDYNQRLDSQNRIVDP
FLAEGYEVNYQVSDDPDAVYGYLSIPSLEIMEPVYLGADYHHLAMGLAHVDGTPLPVEGKGIRSVIAGHRAEPSH
VFFRHLDQLKVGDALYYDNGQEIVEYQMMDTEIILPSEWEKLESVSSKNIMTLITCDPIPTFNKRLLVNFERVAV
YQKSDPQTAAVARVAFTKEGQSVSRVATSQWLYRGLVVLAFLGILFVLWKLARLLRGK

[1147] As discussed above, a S. pneumoniae AI sequence is present in the 19A Hungary 6 S. pneumoniae genome. Examples of S. pneumoniae AI sequences from 19A Hungary 6 are set forth below.

[1148] ORF2_{—}19AH is a transcriptional regulator. An example of an amino acid sequence of ORF2_{—}19AH is set forth in SEQ ID NO: 187.

SEQ ID NO: 187
MLNKYIEKRITDKITILNILLDIRSIELDELSTLTSLQSKSLLSILQELQETFEEELTFNLDTQQVQLIEHHSHQ
TNYYFHQLYNQSTILKILRFFLLQGNQSFNEFTQKEYISIATGYRVRQKCGLLLRSVGLDLVKNQVVGPEYRIRF
LIALLQFHFGIEIYDLNDGSMDWVTHMIVQSNSQLSHELLEITPDEYVHFSILVALTWKRREFPLEFPESKEFEK
LKNLFMYPILMEHCQTYLEPHANMTFTQEELDYIFLVYCSANSSFSKDKWNQEKKTHTIQLILQHTRGKHLLSKF
KNILGNDISNSLSFLTALTFLTRTFLFGLQNLVPYYNYYEHYGIESDKPLYHISKAIVQEWMTEQKIEGVIDQHR
LYLFSLYLTETIFSSLPAIPIFIILNNQADVNLIKSIILRNFTDKVASVTGYNILISPPPSEEHLTEPLIIITTK
EYLPYVKKQYPKGKHHFLTIALDLHVSQQRLIYQTIVDIRKEAFDKRVAMIAKKAHYLL

[1149] ORF3_{—}19AH is a cell wall surface protein. An example of an amino acid sequence of ORF3_{—}19AH is set forth in SEQ ID NO: 188.

SEQ ID NO: 188
MKKVRKIFQKAVAGLCCISQLTAFSSIVALAETPETSPAIGKVVIKETGEGGALLGDAVFELKNNTDGTTVSQRT
EAQTGEAIFSNIKPGTYTLTEAQPPVGYKPSTKQWTVEVEKNGRTTVQGEQVENREEALSDQYPQTGTYPDVQTP
YQIIKVDGSEKNGQHKALNPNPYERVIPEGTLSKRIYQVNNLDDNQYGIELTVSGKTTVETKEASTPLDVVILLD
NSNSMSNIRHNHAHRAEKAGEATRALVDKITSNPDNRVALVTYGSTIFDGSEATVEKGVADANGKILNDSALWTF
DRTTFTAKTYNYSFLNLTSDPTDIQTIKDRIPSDAEELNKDKLMYQFGATFTQKALMTADDILTKQARPNSKKVI
FHITDGVPTMSYPINFKYTGTTQSYRTQLNNFKAKTPNSSGILLEDFVTWSADGEHKIVRGDGESYQMFTKKPVT
DQYGVHQFLSFTSMEQRAKLVSAGYRFYGTDLYLYWRDSILAYPFNSSTDWITNHGDPTTWYYNGNMAQDGYDVF
TVGVGVNGDPGTDEATATRFMQSISSSPDNYTNVADPSQILQELNRYFYTIVNEKKSIENGTITDPMGELIDFQL
GADGRFDPADYTLTANDGSSLVNNVPTGGPQNDGGLLKNAKVFYDTTEKRIRVTGLYLGTGEKVTLTYNVRLNDQ
FVSNKFYDTNGRTTLHPKEVEKNTVRDFPIPKIRDVRKYPEITIPKEKKLGEIEFIKINKNDKKPLRDAVFSLQK
QHPDYPDIYGAIDQNGTYQNVRTGEDGKLTFKNLSDGKYRLFENSEPAGYKPVQNKPIVAFQIVNGEVRDVTSIV
PQDIPAGYEFTNDKHYITNEPIPPKREYPRTGGIGMLPFYLIGCMMMGGVLLYTRKNP

[1150] ORF4_{—}19AH is a cell wall surface protein. An example of an amino acid sequence of ORF4_{—}19AH is set forth in SEQ ID NO: 189.

SEQ ID NO: 189
MKSINKFLTMLAALLLTASSLFSAATVFAADNVSTAPDAVTKTLTIHKLLLSEDDLKTWDTNGPKGYDGTQSSLK
DLTGVVAEEIPNVYFELQKYNLTDGKEKENLKDDSKWTTVHGGLTTKDGLKIETSTLKGVYRIREDRTKTTYVGP
NGQVLTGSKAVPALVTLPLVNNNGTVIDAHVFPKNSYNKPVVDKRIADTLNYNDQNGLSIGTKIPYVVNTTIPSN
ATFATSFWSDEMTEGLTYNEDVTITLNNVAMDQADYEVTKGXNGFNLKLTEAGLAKINGKDADQKIQITYSATLN
SLAVADIPESNDITYHYGNHQDHGNTPKPTKPNNGQITVTKTWDSQPAPEGVKATVQLVNAKTGEKVGAPVELSE
NNWTYTWSGLDNSIEYKVEEEYNGYSAEYTVESKGKLGVKNWKDNNPAPINPEEPRVKTYGKKFVKVDQKDTRLE
NAQFVVKKADSNKYIAFKSTAQQAADEKAAATAKQKLDAAVAAYTNAADKQAAQALVDQAQQEYNVAYKEAKFGY
VEVAGKDEAMVLTSNTDGQFQISGLAAGTYKLEEIKAPEGFAKIDDVEFVVGAGSWNQGEFNYLKDVQKNDATKV
VNKKITIPQTGGIGTIIFAVAGAAIMGIAVYAYVKNNKDEDQLA

[1151] ORF5_{—}19AH is a cell wall surface protein. An example of an amino acid sequence of ORF5_{—}19AH is set forth in SEQ ID NO: 190.

SEQ ID NO: 190
MTMQKMQKMISRIFFVMALCFSLVWGAHAVQAQEDHTLVLQLENYQEVVSQLPSRDGHRLQVWKLDDSYSYDDRV
QIVRDLHSWDENKLSSFKKTSFEMTFLENQIEVSHIPNGLYYVRSIIQTDAVSYPAEFLFEMTDQTVEPLVIVAK
KTDTMTTKVKLIKVDQDHNRLEGVGFKLVSVARDGSEKEVPLIGEYRYSSSGQVGRTLYTDKNGEIFVTNLPLGN
YRFKEVEPLAGYAVTTLDTDVQLVDHQLVTITVVNQKLPRGNVDFMKVDGRTNTSLQGAMFKVMKEESGHYTPVL
QNGKEVVVTSGKDGRFRVEGLEYGTYYLWELQAPTGYVQLTSPVSFTIGKDTRKELVTVVKNNKRPRIDVPDTGE
ETLYILMLVAILLFGSGYYLTKKPNN

[1152] ORF6_{—}19AH is a putative sortase. An example of an amino acid sequence of ORF6_{—}19AH is set forth in SEQ ID NO: 191.

SEQ ID NO: 191
MLIKMVKTKKQKRNNLLLGVVFFIGMAVMAYPLVSRLYYRVESNQQIADFDKEKATLDEADIDERMKLAQAFNDS
LNNVVSGDPWSEEMKKKGRAEYARMLEIHERMGHVEIPVIDVDLPVYAGTAEEVLQQGAGHLEGTSLPIGGNSTH
AVITAHTGLPTAKMFTDLTKLKVGDKFYVHNIKEVMAYQVDQVKVIEPTNFDDLLIVPGHDYVTLLTCTPYMINT
HRLLVRGHRIPYVAEVEEEFIAANKLSHLYRYLFYVAVGLIVILLWIIRRLRKKKKQPEKALKALKAARKEVKVE
DGQQ

[1153] ORF7_{—}19AH is a putative sortase. An example of an amino acid sequence of ORF7_{—}19AH is set forth in SEQ ID NO: 192.

SEQ ID NO: 192
MDNSRRSRKKGTKKKKHPLILLLIFLVGFAVAIYPLVSRYYYRIESNEVIKEFDETVSQMDKAELEERWRLAQAF
NATLKPSEILDPFTEQEKKKGVSEYANMLKVHERIGYVEIPAIDQEIPMYVGTSEEILQKGAGLLEGASLPVGGE
NTHTVVTAHRGLPTAELFSQLDKMKKGDVFYLHVLDQVLAYQVDQILTVEPNDFEPVLIQHGEDYATLLTCTPYM
INSHRLLVRGKRIPYTAPIAERNRAVRERGQFWLWLLLAALVMILVLSYGVYRHRRIVKGLEKQLEEHHVKG

[1154] ORF8_{—}19AH is a putative sortase. An example of an amino acid sequence of ORF8_{—}19AH is set forth in SEQ ID NO: 193.

SEQ ID NO: 193
MSKAKLQKLLGYLLMLVALVIPVYCFGQMVLQSLGQVKGHEIFSESVTADSYQEQLQRSLDYNQRLDSQNRIVDP
FLAEGYEVNYQVSDDPDAVYGYLSIPSLEIMEPVYLGADYHHLAMGLAHVDGTPLPVEGKGIRSVIAGHRAEPSH
VFFRHLDQLKVGDALYYDNGQEIVEYQMMDTEIILPSEWEKLESVSSKNIMTLITCDPIPTFNKRLLVNFERVAV
YQKSDPQTAAVARVAFTKEGQSVSRVATSQWLYRGLVVLAFMGILFVLWKLARLLRGK

[symbol]

pneumoniae genome. Examples of S. pneumoniae AI sequences from 6B Finland 12 are set forth below.

[1155] ORF2_{—}6BF is a transcriptional regulator. An example of an amino acid sequence of ORF2_{—}6BF is set forth in SEQ ID NO: 194.

SEQ ID NO: 194
MLNKYIEKRITDKITILNILLDIRSIELDELSTLTSLQSKSLLSILQELQETFEEELTFNLDTQQVQLIEHHSHQ
TNYYFHQLYNQSTILKILRFFLLQGNQSFNEFTQKEYISIATGYRVRQKCGLLLRSVGLDLVKNQVVGPEYRIRF
LIALLQFHFGIEIYDLNDGSMDWVTHMIVQSNSQLSHELLEITPDEYVHFSILVALTWKRREFPLEFPESKEFEK
LKNLFMYPILMEHCQTYLEPHANMTFTQEELDYIFLVYCSANSSFSKDKWNQEKKTHTIQLILQHTRGKHLLSKF
KNILGNDISNSLSFLTALTFLTRTFLFGLQNLVPYYNYYEHYGIESDKPLYHISKAIVQEWMTEQKIEGVIDQHR
LYLFSLYLTETIFSSLPAIPIFIILNNQADVNLIKSIILRNFTDKVASVTGYNILISPPPSEEHLTEPLIIITTK
EYLPYVKKQYPKGKHHFLTIALDLHVSQQRLIYQTIVDIRKEAFDKRVAMIAKKAHYLL

[1156] ORF3_{—}6BF is a cell wall surface protein. An example of an amino acid sequence of ORF3_{—}6BF is set forth in SEQ ID NO: 195.

SEQ ID NO: 195
MKKVRKIFQKAVAGLCCISQLTAFSSIVALAETPETSPAIGKVVIKETGEGGALLGDAVFELKNNTDGTTVSQRT
EAQTGEAIFSNIKPGTYTLTEAQPPVGYKPSTKQWTVEVEKNGRTTVQGEQVENREEALSDQYPQTGTYPDVQTP
YQIIKVDGSEKNGQHKALNPNPYERVIPEGTLSKRIYQVNNLDDNQYGIELTVSGKTTVETKEASTPLDVVILLD
NSNSMSNIRHNHAHRAEKAGEATRALVDKITSNPDNRVALVTYGSTIFDGSEATVEKGVADANGKILNDSALWTF
DRTTFTAKTYNYSFLNLTSDPTDIQTIKDRIPSDAEELNKDKLMYQFGATFTQKALMTADDILTKQARPNSKKVI
FHITDGVPTMSYPINFKYTGTTQSYRTQLNNFKAKTPNSSGILLEDFVTWSADGEHKIVRGDGESYQMFTKKPVT
DQYGVHQILSITSMEQRAKLVSAGYRFYGTDLYLYWRDSILAYPFNSSTDWITNHGDPTTWYYNGNMAQDGYDVF
TVGVGVNGDPGTDEATATRFMQSISSSPDNYTNVADPSQILQELNRYFYTIVNEKKSIENGTITDPMGELIDFQL
GADGRFDPADYTLTANDGSSLVNNVPTGGPQNDGGLLKNAKVFYDTTEKRIRVTGLYLGTGEKVTLTYNVRLNDQ
FVSNKFYDTNGRTTLHPKEVEKNTVRDFPIPKIRDVRKYPEITIPKEKKLGEIEFIKINKNDKKPLRDAVFSLQK
QHPDYPDIYGAIDQNGTYQNVRTGEDGKLTFKNLSDGKYRLFENSEPAGYKPVQNKPIVAFQIVNGEVRDVTSIV
PQDIPAGYEFTNDKHYITNEPIPPKREYPRTGGIGMLPFYLIGCMMMGGVLLYTRKHP

[1157] ORF4_{—}6BF is a cell wall surface protein. An example of an amino acid sequence of ORF4_{—}6BF is set forth in SEQ ID NO: 196.

SEQ ID NO: 196

MKSINKFLTMLAALLLTASSLFSAATVFAADNVSTAPDAVTKTLTIHKLLLSEDDLKTWDTNGPKGYDGTQSSLK
DLTGVVAEEIPNVYFELQKYNLTDGKEKENLKDDSKWTTVHGGLTTKDGLKIETSTLKGVYRIREDRTKTTYVGP
NGQVLTGSKAVPALVTLPLVNNNGTVIDAHVFPKNSYNKPVVDKRIADTLNYNDQNGLSIGTKIPYVVNTTIPSN
ATFATSFWSDEMTEGLTYNEDVTITLNNVAMDQADYEVTKGNNGFNLKLTEAGLAKINGKDADQKIQITYSATLN
SLAVADIPESNDITYHYGNHQDHGNTPKPTKPNNGQITVTKTWDSQPAPEGVKATVQLVNAKTGEKVGAPVELSE
NNWTYTWSGLDNSIEYKVEEEYNGYSAEYTVESKGKLGVKNWKDNNPAPINPEEPRVKTYGKKFVKVDQKDTRLE
NAQFVVKKADSNKYIAFKSTAQQAADEKAAATAKQKLDAAVAAYTNAADKQAAQALVDQAQQEYNVAYKEAKFGY
VEVAGKDEAMVLTSNTDGQFQISGLAAGTYKLEEIKAPEGFAKIDDVEFVVGAGSWNQGEFNYLKDVQKNDATKV
VNKKITIPQTGGIGTIIFAVAGAAIMGIAVYAYVKNNKDEDQLA

[1158] ORF5_{—}6BF is a cell wall surface protein. An example of an amino acid sequence of ORF5_{—}6BF is set forth in SEQ ID NO: 197.

SEQ ID NO: 197
MTMQKMQKMISRIFFVMALCFSLVWGAHAVQAQEDHTLVLQLENYQEVVSQLPSRDGHRLQVWKLDDSYSYDDRV
QIVRDLHSWDENKLSSFKKTSFEMTFLENQIEVSHIPNGLYYVRSIIQTDAVSYPAEFLFEMTDQTVEPLVIVAK
KTDTMTTKVKLIKVDQDHNRLEGVGFKLVSVARDGSEKEVPLIGEYRYSSSGQVGRTLYTDKNGEIFVTNLPLGN
YRFKEVEPLAGYAVTTLDTDVQLVDHQLVTITVVNQKLPRGNVDFMKVDGRTNTSLQGAMFKVMKEESGHYTPVL
QNGKEVVVTSGKDGRFRVEGLEYGTYYLWELQAPTGYVQLTSPVSFTIGKDTRKELVTVVKNNKRPRIDVPDTGE
ETLYILMLVAILLFGSGYYLTKKPNN

[symbol]

forth in SEQ ID NO: 198.

SEQ ID NO: 198

MLIKMVKTKKQKRNNLLLGVVFFIGMAVMAYPLVSRLYYRVESNQQIADF
DKEKATLDEADIDERMKLAQAFNDSLNNVVSGDPWSEEMKKKGRAEYARM
LEIHERMGHVRIPVIDVDLPVYAGTAEEVLQQGAGHLEGTSLPIGGNSTH
AVITAHTGLPTAKMFTDLTKLKVGDKFYVHNIKEVMAYQVDQVKVIEPTN
FDDLLIVPGHDYVTLLTCTPYMINTHRLLVRGHRIPYVAEVEEEFIAANK
LSHLYRYLFYVAVGLIVILLWIIRRLRKKKKQPEKALKALKAARKEVKVE
DGQQ

[1159] ORF7_{—}6BF is a putative sortase. An example of an amino acid sequence of ORF7_{—}6BF is set forth in SEQ ID NO: 199.

SEQ ID NO: 199

MDNSRRSRKKGTKKKKHPLILLLIFLVGFAVAIYPLVSRYYYRIESNEVI
KEFDETVSQMDKAELEERWRLAQAFNATLKPSEILDPFTEQEKKKGVSEY
ANMLKVHERIGYVEIPAIDQEIPMYVGTSEEILQKGAGLLEGASLPVGGE
NTHTVVTAHRGLPTAELFSQLDKMKKGDVFYLHVLDQVLAYQVDQILTVE
PNDFEPVLIQHGEDYATLLTCTPYMINSHRLLVRGKRIPYTAPIAERNRA
VRERGQFWLWLLLAALVMILVLSYGVYRHRRIVKGLEKQLEEHHVKG

[1160] ORF8_{—}6BF is a putative sortase. An example of an amino acid sequence of ORF8_{—}6BF is set forth in SEQ ID NO: 200.

SEQ ID NO: 200

MSKAKLQKLLGYLLMLVALVIPVYCFGQMVLQSLGQVKGHEIFSESVTAD
SYQEQLQRSLDYNQRLDSQNRIVDPFLAEGYEVNYQVSDDPDAVYGYLSI
PSLEIMEPVYLGADYHHLAMGLAHVDGTPLPVEGKGIRSVIAGHRAEPSH
VFFRHLDQLKVGDALYYDNGQEIVEYQMMDTEIILPSEWEKLESVSSKNI
MTLITCDPIPTFNKRLLVNFERVAVYQKSDPQTAAVARVAFTKEGQSVSR
VATSQWLYRGLVVLAFLGILFVLWKLARLLRGK

[1161] As discussed above, a S. pneumoniae AI sequence is present in the 6B Spain 2 S. pneumoniae genome. Examples of S. pneumoniae AI sequences from 6B Spain 2 are set forth below.

[1162] ORF2_{—}6BSP is a transcriptional regulator. An example of an amino acid sequence of ORF2_{—}6BSP is set forth in SEQ ID NO: 201.

SEQ ID NO: 201

MLNKYIEKRITDKITILNILLDIRSIELDELSTLTSLQSKSLLSILQELQ
ETFEEELTFNLDTQQVQLIEHHSHQTNYYFHQLYNQSTILKILRFFLLQG
NQSFNEFTQKEYISIATGYRVRQKCGLLLRSVGLDLVKNQVVGPEYRIRF
LIALLQFHFGIEIYDLNDGSMDWVTHMIVQSNSQLSHELLEITPDEYVHF
SILVALTWKRREFPLEFPESKEFEKLKNLFMYPILMEHCQTYLEPHANMT
FTQEELDYIFLVYCSANSSFSKDKWNQEKKTHTIQLILQHTRGKHLLSKF
KNILGNDISNSLSFLTALTFLTRTFLFGLQNLVPYYNYYEHYGIESDKPL
YHISKAIVQEWMTEQKIEGVIDQHRLYLFSLYLTETIFSSLPAIPIFIIL
NNQADVNLIKSIILRNFTDKVASVTGYNILISPPPSEEHLTEPLIIITTK
EYLPYVKKQYPKGKHHFLTIALDLHVSQQRLIYQTIVDIRKEAFDKRVAM
IAKKAHYLL

[1163] ORF3_{—}6BSP is a cell wall surface protein. An example of an amino acid sequence of ORF3_{—}6BSP is set forth in SEQ ID NO: 202.

SEQ ID NO: 202

MKKVRKIFQKAVAGLCCISQLTAFSSIVALAETPETSPAIGKVVIKETGE
GGALLGDAVFELKNNTDGTTVSQRTEAQTGEAIFSNIKPGTYTLTEAQPP
VGYKPSTKQWTVEVEKNGRTTVQGEQVENREEALSDQYPQTGTYPDVQTP
YQIIKVDGSEKNGQHKALNPNPYERVIPEGTLSKRIYQVNNLDDNQYGIE
LTVSGKTTVETKEASTPLDVVILLDNSNSMSNIRHNHAHRAEKAGEATRA
LVDKITSNPDNRVALVTYGSTIFDGSEATVEKGVADANGKILNDSALWTF
DRTTFTAKTYNYSFLNLTSDPTDIQTIKDRIPSDAEELNKDKLMYQFGAT
FTQKALMTADDILTKQARPNSKKVIFHITDGVPTMSYPINFKYTGTTQSY
RTQLNNFKAKTPNSSGILLEDFVTWSADGEHKIVRGDGESYQMFTKKPVT
DQYGVHQILSITSMEQRAKLVSAGYRFYGTDLYLYWRDSILAYPFNSSTD
WITNHGDPTTWYYNGNMAQDGYDVFTVGVGVNGDPGTDEATATRFMQSIS
SSPDNYTNVADPSQILQELNRYFYTIVNEKKSIENGTITDPMGELIDFQL
GADGRFDPADYTLTANDGSSLVNNVPTGGPQNDGGLLKNAKVFYDTTEKR
IRVTGLYLGTGEKVTLTYNVRLNDQFVSNKFYDTNGRTTLHPKEVEKNTV
RDFPIPKIRDVRKYPEITIPKEKKLGEIEFIKINKNDKKPLRDAVFSLQK
QHPDYPDIYGAIDQNGTYQNVRTGEDGKLTFKNLSDGKYRLFENSEPAGY
KPVQNKPIVAFQIVNGEVRDVTSIVPQDIPAGYEFTNDKHYITNEPIPPK
REYPRTGGIGMLPFYLIGCMMMGGVLLYTRKHP

[symbol]

ORF4-6BSP is set forth in SEQ ID NO: 203.

SEQ ID NO: 203

MKSINKFLTMLAALLLTASSLFSAATVFAADNVSTAPDAVTKTLTIHKLL
LSEDDLKTWDTNGPKGYDGTQSSLKDLTGVVAEEIPNVYFELQKYNLTDG
KEKENLKDDSKWTTVHGGLTTKDGLKIETSTLKGVYRIREDRTKTTYVGP
NGQVLTGSKAVPALVTLPLVNNNGTVIDAHVFPKNSYNKPVVDKRIADTL
NYNDQNGLSIGTKIPYVVNTTIPSNATFATSFWSDEMTEGLTYNEDVTIT
LNNVAMDQADYEVTKGNNGFNLKLTEAGLAKINGKDADQKIQITYSATLN
SLAVADIPESNDITYHYGNHQDHGNTPKPTKPNNGQITVTKTWDSQPAPE
GVKATVQLVNAKTGEKVGAPVELSENNWTYTWSGLDNSIEYKVEEEYNGY
SAEYTVESKGKLGVKNWKDNNPAPINPEEPRVKTYGKKFVKVDQKDTRLE
NAQFVVKKADSNKYIAFKSTAQQAADEKAAATAKQKLDAAVAAYTNAADK
QAAQALVDQAQQEYNVAYKEAKFGYVEVAGKDEAMVLTSNTDGQFQISGL
AAGTYKLEEIKAPEGFAKIDDVEFVVGAGSWNQGEFNYLKDVQKNDATKV
VNKKITIPQTGGIGTIIFAVAGAAIMGIAVYAYVKNNKDEDQLA

[1164] ORF5_{—}6BSP is a cell wall surface protein. An example of an amino acid sequence of ORF5_{—}6BSP is set forth in SEQ ID NO: 204.

SEQ ID NO: 204

MTMQKMQKMISRIFFVMALCFSLVWGAHAVQAQEDHTLVLQLENYQEVVS
QLPSRDGHRLQVWKLDDSYSYDDRVQIVRDLHSWDENKLSSFKKTSFEMT
FLENQIEVSHIPNGLYYVRSIIQTDAVSYPAEFLFEMTDQTVEPLVIVAK
KTDTMTTKVKLIKVDQDHNRLEGVGFKLVSVARDGSEKEVPLIGEYRYSS
SGQVGRTLYTDKNGEIFVTNLPLGNYRFKEVEPLAGYAVTTLDTDVQLVD
HQLVTITVVNQKLPRGNVDFMKVDGRTNTSLQGAMFKVMKEESGHYTPVL
QNGKEVVVTSGKDGRFRVEGLEYGTYYLWELQAPTGYVQLTSPVSFTIGK
DTRKELVTVVKNNKRPRIDVPDTGEETLYILMLVAILLFGSGYYLTKKPN
N

[1165] ORF6_{—}6BSP is a putative sortase. An example of an amino acid sequence of ORF6-6BSP is set forth in SEQ ID NO: 205.

SEQ ID NO: 205

MLIKMVKTKKQKRNNLLLGVVFFIGMAVMAYPLVSRLYYRVESNQQIADF
DKEKATLDEADIDERMKLAQAFNDSLNNVVSGDPWSEEMKKKGRAEYARM
LEIHERMGHVEIPVIDVDLPVYAGTAEEVLQQGAGHLEGTSLPIGGNSTH
AVITAHTGLPTAKMFTDLTKLKVGDKFYVHNIKEVMAYQVDQVKVIEPTN
FDDLLIVPGHDYVTLLTCTPYMINTHRLLVRGHRIPYVAEVEEEFIAANK
LSHLYRYLFYVAVGLIVILLWIIRRLRKKKKQPEKALKALKAARKEVKVE
DGQQ

[1166] ORF7_{—}6BSP is a putative sortase. An example of an amino acid sequence of ORF7_{—}6BSP is set forth in SEQ ID NO: 206.

SEQ ID NO: 206

MDNSRRSRKKGTKKKKHPLILLLIFLVGFAVAIYPLVSRYYYRIESNEVI
KEFDETVSQMDKAELEERWRLAQAFNATLKPSEILDPFTEQEKKKGVSEY
ANMLKVHERIGYVEIPAIDQEIPMYVGTSEEILQKGAGLLEGASLPVGGE
NTHTVVTAHRGLPTAELFSQLDKMKKGDVFYLHVLDQVLAYQVDQILTVE
PNDFEPVLIQHGEDYATLLTCTPYMINSHRLLVRGKRIPYTAPIAERNRA
VRERGQFWLWLLLAALVMILVLSYGVYRHRRIVKGLEKQLEEHHVKG

[1167] ORF8_{—}6BSP is a putative sortase. An example of an amino acid sequence of ORF8_{—}6BSP is set forth in SEQ ID NO: 207.

SEQ ID NO: 207

MSKAKLQKLLGYLLMLVALVIPVYCFGQMVLQSLGQVKGHEIFSESVTAD
SYQEQLQRSLDYNQRLDSQNRIVDPFLAEGYEVNYQVSDDPDAVYGYLSI
PSLEIMEPVYLGADYHHLAMGLAHVDGTPLPVEGKGIRSVIAGHRAEPSH
VFFRHLDQLKVGDALYYDNGQEIVEYQMMDTEIILPSEWEKLESVSSKNI
MTLITCDPIPTFNKRLLVNFERVAVYQKSDPQTAAVARVAFTKEGQSVSR
VATSQWLYRGLVVLAFLGILFVLWKLARLLRGK

[1168] As discussed above, a S. pneumoniae AI sequence is present in the 9V Spain 3 S. pneumoniae genome. Examples of S. pneumoniae AI sequences from 9V Spain 3 are set forth below.

[1169] ORF2_{—}9VSP is a transcriptional regulator. An example of an amino acid sequence of ORF2_{—}9VSP is set forth in SEQ ID NO: 208.

SEQ ID NO: 208

MLNKYIEKRITDKITILNILLDIRSIELDELSTLTSLQSKSLLSILQELQ
ETFEEELTFNLDTQQVQLIEHHSHQTNYYFHQLYNQSTILKILRFFLLQG
NQSFNEFTQKEYISIATGYRVRQKCGLLLRSVGLDLVKNOVVGPEYRIRF
LIALLQFHFGIEIYDLNDGSMDWVTHMIVQSNSQLSHELLEITPDEYVHF
SILVALTWKRREFPLEFPESKEFEKLKNLFMYPILMEHCQTYLEPHANMT
FTQEELDYIFLVYCSANSSFSKDKWNQEKKTHTIQLILQHTRGKHLLSKF
KNILGNDISNSLSFLTALTFLTRTFLFGLQNLVPYYNYYEHYGIESDKPL
YHISKAIVQEWMTEQKIEGVIDQHRLYLFSLYLTETIFSSLPAIPIFIIL
NNQADVNLIKSIILRNFTDKVASVTGYNILISPPPSEEHLTEPLIIITTK
EYLPYVKKQYPKGKHHFLTIALDLHVSQQRLIYQTIVDIRKEAFDKRVAM
IAKKAHYLL

[1170] ORF3_{—}9VSP is a cell wall surface protein. An example of an amino acid sequence of ORF3_{—}9VSP is set forth in SEQ ID NO: 209.

SEQ ID NO: 209

MKKVRKIFQKAVAGLCCISQLTAFSSIVALAETPETSPAIGKVVIKETGE
GGALLGDAVFELKNNTNGTTVSQRTEAQTGEAIFSNIKPGTYTLTEAQPP
VGYKPSTKQRTVEVEKNGRTTVQGEQVENREEALSDQYPQTGTYPDVQTP
YQIIKVDGSEKNGQHKALNPNPYERVIPEGTLSKRIYQVNNLDDNQYGIE
LTVSGKTVYERKDKSVPLDVVILLDNSNSMSNIRNKNARRAERAGEATRS
LIDKITSDPENRVALVTYASTIFDGTEFTVEKGVADKNGKRLNDSLFWNY
DQTSFTTNTKDYSYLKLTNDKNDIVELKNKVPTEAEDHDGNRLMYQFGAT
FTQKALMKADEILTQQARQNSQKVIFHITDGVPTMSYPINFNHATFAPSY
QNQLNAFFSKSPNKDGILLSDFITQATSGEHTIVRGDGQSYQMFTDKTVY
EKGAPAAFPVKPEKYSEMKAVGYAVIGDPINGGYIWLNWRESILAYPFNS
NTAKITNHGDPTRWYYNGNIAPDGYDVFTVGIGINGDPGTDEATATSFMQ
SISSKPENYTNVTDTTKILEQLNRYFHTIVTEKKSIENGTITDPMGELID
LQLGTDGRFDPADYTLTANDGSRLENGQAVGGPQNDGGLLKNAKVFYDTT
EKRIRVTGLYLGTGEKVTLTYNVRLNDQFVSNKFYDTNGRTTLHPKEVEK
NTVRDFPIPKIRDVRKYPAITIAKEKKLGEIEFIKINKNDKKPLRDAVFS
LQKQHPDYPDIYGAIDQNGTYQNVRTGEDGKLTFKNLSDGKYRLFENSEP
AGYKPVQNKPIVAFQIVNGEVRDVTSIVPQDIPAGYEFTNDKHYITNEPI
PPKREYPRTGGIGMLLFYLIGCMMMGGVLLYTRKHP

[1171] ORF4_{—}9VSP is a cell wall surface protein. An example of an amino acid sequence of ORF4_{—}9VSP is set forth in SEQ ID NO: 210.

SEQ ID NO: 210

MKSINKFLTMLAALLLTASSLFSAATVFAAGTTTTSVTVHKLLATDGDMD
KIANELETGNYAGNKVGVLPANAKEIAGVMFVWTNTNNEIIDENGQTLGV
NIDPQTFKLSGAMPATAMKKLTEAEGAKFNTANLPAAKYKIYEIHSLSTY
VGEDGATLTGSKAVPIEIELPLNDVVDAHVYPKNTEAKPKIDKDFKGKAN
PDTPRVDKDTPVNHQVGDVVEYEIVTKIPALANYATANWSDRMTEGLAFN
KGTVKVTVDDVALEAGDYALTEVATGFDLKLTDAGLAKVNDQNAEKTVKI
TYSATLNDKAIVEVPESNDVTFNYGNNPDHGNTPKPNKPNENGDLTLTKT
WVDATGAPIPAGAEATFDLVNAQTGKVVQTVTLTTDKNTVTVNGLDKNTE
YKFVERSIKGYSADYQEITTAGEIAVKNWKDENPKPLDPTEPKVVTYGKK
FVKVNDKDNRLAGAEFVIANADNAGQYLARKADKVSQEEKQLVVTTKDAL
DRAVAAYNALTAQQQTQQEKEKVDKAQAAYNAAVIAANNAFEWVADKDNE
NVVKLVSDAQGRFEITGLLAGTYYLEETKQPAGYALLTSRQKFEVTATSY
SATGQGIEYTAGSGKDDATKVVNKKITIPQTGGIGTIIFAVAGAVIMGIA
VYAYVKNNKDEDQLA

[1172] ORF5_{—}9VSP is a cell wall surface protein. An example of an amino acid sequence of ORF5_{—}9VSP is set forth in SEQ ID NO: 211.

SEQ ID NO: 211

MTMQKMQKMQKMQKMQKMQKMISRIFFVMALCFSLVWGAHAVQAQEDHTL
VLQLENYQEVVSQLPSRDGHRLQVWKLDDSYSYDNRVQIVRDLHSWDENK
LSSFKKTSFEMTFLENQIEVSHIPNGLYYVRSIIQTDAVSYPAEFLFEMT
DQTVEPLVIVAKKADTVTTKVKLIKVDQDHNRLEGVGFKLVSVARDGSEK
EVPLIGEYRYSSSGQVGRTLYTDKNGEIVVTNLPLGTYRFKEVEPLAGYT
VTTMDTDVQLVDHQLVTITVVNQKLPRGNVDFMKVDGRTNTSLQGAMFKV
MKEENGHYTPVLQNGKEVVVASGKDGRFRVEGLEYGTYYLWELQAPTGYV
QLTSPVSFTIGKDTRKELVTVVKNNKRPRIDVPDTGEETLYILMLVAILL
FGSGYYLTKKTNN

[1173] ORF6_{—}9VSP is a putative sortase. An example of an amino acid sequence of ORF6_{—}9VSP is set forth in SEQ ID NO: 212.

SEQ ID NO: 212

MLIKMAKTKKQKRNNLLLGVVFFIGIAVMAYPLVSRLYYRVESNQQIADF
DKEKATLDEADIDERMKLAQAFNDSLNNVVSGDPWSEEMKKKGRAEYARM
LEIHERMGHVEIPAIDVDLPVYAGTAEEVLQQGAGHLEGTSLPIGGNSTH
AVITAHTGLPTAKMFTDLTKLKVGDKFYVHNIKEVMAYQVDQVKVIEPTN
FDDLLIVPGHDYVTLLTCTPYMINTHRLLVRGHRIPYVAEVEEEFIAANK
LSHLYRYLFYVAVGLIVILLWIIRRLRKKKRQSERALKALKEATKEVKVE
DE

[1174] ORF7_{—}9VSP is a putative sortase. An example of an amino acid sequence of ORF7_{—}9VSP is set forth in SEQ ID NO: 213.

SEQ ID NO: 213

MSKSRYSRKKSVKKKKNPFILLLIFLVGLAVAMYPLVSRYYYRIESNEVI
KEFDETVSQMDKAELEERWRLAQAFNATLKPSEILDPFTEQEKKKGVSEY
ANMLKVHERIGYVEIPAIDQEIPMYVGTSEEILQKGAGLLEGASLPVGGE
NTHTVVTAHRGLPTAELFSQLDKMKKGDIFYLHVLDQVLAYQVDQIVTVE
PNDFEPVLIQHGEDYATLLTCTPYMINSHRLLVRGKRIPYTAPIAERNRA
VRERGQFWLWLLLGMAVILLLLYRVYRNRRIVKGLEKQLEGRHVKD

[1175] ORF8_{—}9VSP is a putative sortase. An example of an amino acid sequence of ORF8_{—}9VSP is set forth in SEQ ID NO: 214.

SEQ ID NO: 214

MSRTKLRALLGYLLMLVACLIPIYCFGQMVLQSLGQVKGHATFVKSMTTE
MYQEQQNHSLAYNQRLASQNRIVDPFLAEGYEVNYQVSDDPDAVYGYLSI
PSLEIMEPVYLGADYHHLGMGLAHVDGTPLPLDGTGIRSVIAGHRAEPSH
VFFRHLDQLKVGDALYYDNGQEIVEYQMMDTEIILPSEWEKLESVSSKNI
MTLITCDPIPTFNKRLLVNFERVAVYQKSDPQTAAVARVAFTKEGQSVSR
VATSQWLYRGLVVLAFLGILFVLWKLARLLRGK

[1176] As discussed above, a S. pneumoniae AI sequence is present in the 14 CSR 10 S. pneumoniae genome. Examples of S. pneumoniae AI sequences from 14 CSR 10 are set forth below.

[1177] ORF2_{—}14CSR is a transcriptional regulator. An example of an amino acid sequence of ORF2_{—}14CSR is set forth in SEQ ID NO: 215.

SEQ ID NO: 215

MLNKYIEKRITDKITILNILLDIRSIELDELSTLTSLQSKSLLSILQELQ
ETFEEELTFNLDTQQVQLIEHHSHQTNYYFHQLYNQSTILKILRFFLLQG
NQSFNEFTQKEYISIATGYRVRQKCGLLLRSVGLDLVKNQVVGPEYRIRF
LIALLQFHFGIEIYDLNDGSMDWVTHMIVQSNSQLSHELLEITPDEYVHF
SILVALTWKRREFPLEFPESKEFEKLKNLFMYPILMEHCQTYLEPHANMT
FTQEELDYIFLVYCSANSSFSKDKWNQEKKTHTIQLILQHTRGKHLLSKF
KNILGNDISNSLSFLTALTFLTRTFLFGLQNLVPYYNYYEHYGIESDKPL
YHISKAIVQEWMTEQKIEGVIDQHRLYLFSLYLTETIFSSLPAIPIFIIL
NNQADVNLIKSIILRNFTDKVASVTGYNILISPPPSEEHLTEPLIIITTK
EYLPYVKKQYPKGKHHFLTIALDLHVSQQRLIYQTIVDIRKEAFDKRVAM
IAKKAHYLL

[1178] ORF3_{—}14CSR is a cell wall surface protein. An example of an amino acid sequence of ORF3_{—}14CSR is set forth in SEQ ID NO: 216.

SEQ ID NO: 216

MKKVRKIFQKAVAGLCCISQLTAFSSIVALAETPETSPAIGKVVIKETGE
GGALLGDAVFELKNNTDGTTVSQRTEAQTGEAIFSNIKPGTYTLTEAQPP
VGYKPSTKQWTVEVEKNGRTTVQGEQVENREEALSDQYPQTGTYPDVQTP
YQIIKVDGSEKNGQHKALNPNPYERVIPEGTLSKRIYQVNNLDDNQYGIE
LTVSGKTTVETKEASTPLDVVILLDNSNSMSNIRHNHAHRAEKAGEATRA
LVDKITSNPDNRVALVTYGSTIFDGSEATVEKGVADANGKILNDSALWTF
DRTTFTAKTYNYSFLNLTSDPTDIQTIKDRIPSDAEELNKDKLMYQFGAT
FTQKALMTADDILTKQARPNSKKVIFHITDGVPTMSYPINFKYTGTTQSY
RTQLNNFKAKTPNSSGILLEDFVTWSADGEHKIVRGDGESYQMFTKKPVT
DQYGVHQILSITSMEQRAKLVSAGYRFYGTDLYLYWRDSILAYPFNSSTD
WITNHGDPTTWYYNGNMAQDGYDVFTVGVGVNGDPGTDEATATRFMQSIS
SSPDNYTNVADPSQILQELNRYFYTIVNEKKSIENGTITDPMGELIDFQL
GADGRFDPADYTLTANDGSSLVNNVPTGGPQNDGGLLKNAKVFYDTTEKR
IRVTGLYLGTGEKVTLTYNVRLNDQFVSNKFYDTNGRTTLHPKEVEKNTV
RDFPIPKIRDVRKYPEITIPKEKKLGEIEFIKINKNDKKPLRDAVFSLQK
QHPDYPDIYGAIDQNGTYQNVRTGEDGKLTFKNLSDGKYRLFENSEPAGY
KPVQNKPIVAFQIVNGEVRDVTSIVPQDIPAGYEFTNDKHYITNEPIPPK
REYPRTGGIGMLPFYLIGCMMMGGVLLYTRKHP

[1179] ORF4_{—}14CSR is a cell wall surface protein. An example of an amino acid sequence of ORF4_{—}14CSR is set forth in SEQ ID NO: 217.

SEQ ID NO: 217

MKSINKFLTMLAALLLTASSLFSAATVFAADNVSTAPDAVTKTLTIHKLL
LSEDDLKTWDTNGPKGYDGTQSSLKDLTGVVAEEIPNVYFELQKYNLTDG
KEKENLKDDSKWTTVHGGLTTKDGLKIETSTLKGVYRIREDRTKTTYVGP
NGQVLTGSKAVPALVTLPLVNNNGTVIDAHVFPKNSYNKPVVDKRIADTL
NYNDQNGLSIGTKIPYVVNTTIPSNATFATSFWSDEMTEGLTYNEDVTIT
LNNVAMDQADYEVTKGNNGFNLKLTEAGLAKINGKDADQKIQITYSATLN
SLAVADIPESNDITYHYGNHQDHGNTPKPTKPNNGQITVTKTWDSQPAPE
GVKATVQLVNAKTGEKVGAPVELSENNWTYTWSGLDNSTEYKVEEEYNGY
SAEYTVESKGKLGVKNWKDNNPAPINPEEPRVKTYGKKFVKVDQKDTRLE
NAQFVVKKADSNKYIAFKSTAQQAADEKAAATAKQKLDAAVAAYTNAADK
QAAQALVDQAQQEYNVAYKEAKFGYVEVAGKDEAMVLTSNTDGQFQISGL
AAGTYKLEEIKAPEGFAKIDDVEFVVGAGSWNQGEFNYLKDVQKNDATKV
VNKKITIPQTGGIGTIIFAVAGAAIMGIAVYAYVKNNKDEDQLA

[1180] ORF5_{—}14CSR is a cell wall surface protein. An example of an amino acid sequence of ORF5_{—}14CSR is set forth in SEQ ID NO: 218.

SEQ ID NO: 218

MTMQKMQKMISRIFFVMALCFSLVWGAHAVQAQEDHTLVLQLENYQEVVS
QLPSRDGHRLQVWKLDDSYSYDDRVQIVRDLHSWDENKLSSFKKTSFEMT
FLENQIEVSHIPNGLYYVRSIIQTDAVSYPAEFLFEMTDQTVEPLVIVAK
KTDTMTTKVKLIKVDQDHNRLEGVGFKLVSVARDGSEKEVPLIGEYRYSS
SGQVGRTLYTDKNGEIFVTNLPLGNYRFKEVEPLAGYAVTTLDTDVQLVD
HQLVTITVVNQKLPRGNVDFMKVDGRTNTSLQGAMFKVMKEESGHYTPVL
QNGKEVVVTSGKDGRFRVEGLEYGTYYLWELQAPTGYVQLTSPVSFTIGK
DTRKELVTVVKNNKRPRIDVPDTGEETLYILMLVAILLFGSGYYLTKKPN
N

[1181] ORF6_{—}14CSR is a putative sortase. An example of an amino acid sequence of ORF6_{—}14CSR is set forth in SEQ ID NO: 219.

SEQ ID NO: 219

MLIKMVKTKKQKRNNLLLGVVFFIGMAVMAYPLVSRLYYRVESNQQIADF
DKEKATLDEADIDERMKLAQAFNDSLNNVVSGDPWSEEMKKKGRAEYARM
LEIHERMGHVEIPVIDVDLPVYAGTAEEVLQQGAGHLEGTSLPIGGNSTH
AVITAHTGLPTAKMFTDLTKLKVGDKFYVHNIKEVMAYQVDQVKVIEPTN
FDDLLIVPGHDYVTLLTCTPYMINTHRLLVRGHRIPYVAEVEEEFIAANK
LSHLYRYLFYVAVGLIVILLWIIRRLRKKKKQPEKALKALKAARKEVKVE
DGQQ

[1182] ORF7_{—}14CSR is a putative sortase. An example of an amino acid sequence of ORF7-14CSR is set forth in SEQ ID NO: 220.

SEQ ID NO: 220

MDNSRRSRKKGTKKKKHPLILLLIFLVGFAVAIYPLVSRYYYRIESNEVI
KEFDETVSQMDKAELEERWRLAQAFNATLKPSEILDPFTEQEKKKGVSEY
ANMLKVHERIGYVEIPAIDQEIPMYVGTSEEILQKGAGLLEGASLPVGGE
NTHTVVTAHRGLPTAELFSQLDKMKKGDVFYLHVLDQVLAYQVDQILTVE
PNDFEPVLIQHGEDYATLLTCTPYMINSHRLLVRGKRIPYTAPIAERNRA
VRERGQFWLWLLLAALVMILVLSYGVYRHRRIVKGLEKQLEEHHVKG

[1183] ORF8_{—}14CSR is a putative sortase. An example of an amino acid sequence of ORF8_{—}14CSR is set forth in SEQ ID NO: 221.

SEQ ID NO: 221

MSKAKLQKLLGYLLMLVALVIPVYCFGQMVLQSLGQVKGHEIFSESVTAD
SYQEQLQRSLDYNQRLDSQNRIVDPFLAEGYEVNYQVSDDPDAVYGYLSI
PSLEIMEPVYLGADYHHLAMGLAHVDGTPLPVEGKGIRSVIAGHRAEPSH
VFFRHLDQLKVGDALYYDNGQEIVEYQMMDTEIILPSEWEKLESVSSKNI
MTLITCDPIPTFNKRLLVNFERVAVYQKSDPQTAAVARVAFTKEGQSVSR
VATSQWLYRGLVVLAFLGILFVLWKLARLLRGK

[1184] As discussed above, a S. pneumoniae AI sequence is present in the 19F Taiwan 14 S. pneumoniae genome. Examples of S. pneumoniae AI sequences from 19F Taiwan 14 are set forth below.

[1185] ORF2_{—}19FTW is a transcriptional regulator. An example of an amino acid sequence of ORF2_{—}19FTW is set forth in SEQ ID NO: 222.

SEQ ID NO: 222

MLNKYIEKRITDKITILNILLDIRSIELDELSTLTSLQSKSLLSILQELQ
ETFEEELTFNLDTQQVQLIEHHSHQTNYYFHQLYNQSTILKILRFFLLQG
NQSFNEFTQKEYISIATGYRVRQKCGLLLRSVGLDLVKNQVVGPEYRIRF
LIALLQFHFGIEIYDLNDGSMDWVTHMIVQSNSQLSHELLEITPDEYVHF
SILVALTWKRREFPLEFPESKEFEKLKNLFMYPILMEHCQTYLEPHANMT
FTQEELDYIFLVYCSANSSFSKDKWNQEKKTHTIQLILQHTRGKHLLSKF
KNILGNDISNSLSFLTALTFLTRTFLFGLQNLVPYYNYYEHYGIESDKPL
YHISKAIVQEWMTEQKIEGVIDQHRLYLFSLYLTETIFSSLPAIPIFIIL
NNQADVNLIKSIILRNFTDKVASVTGYNILISPPPSEEHLTEPLIIITTK
EYLPYVKKQYPKGKHHFLTIALDLHVSQQRLIYQTIVDIRKEAFDKRVAM
IAKKAHYLL

[1186] ORF3_{—}19FTW is a cell wall surface protein. An example of an amino acid sequence of ORF3_{—}19FTW is set forth in SEQ ID NO: 223.

SEQ ID NO: 223

MKKVRKIFQKAVAGLCCISQLTAFSSIVALAETPETSPAIGKVVIKETGE
GGALLGDAVFELKNNTDGTTVSQRTEAQTGEAIFSNIKPGTYTLTEAQPP
VGYKPSTKQWTVEVEKNGRTTVQGEQVENREEALSDQYPQTGTYPDVQTP
YQIIKVDGSEKNGQHKALNPNPYERVIPEGTLSKRIYQVNNLDDNQYGIE
LTVSGKTVYERKDKSVPLDVVILLDNSNSMSNIRNKNARRAERAGEATRS
LIDKITSDPENRVALVTYASTIFDGTEFTVEKGVADKNGKRLNDSLFWNY
DQTSFTTNTKDYSYLKLTNDKNDIVELKNKVPTEAEDHDGNRLMYQFGAT
FTQKALMKADEILTQQARQNSQKVIFHITDGVPTMSYPINFNHATFAPSY
QNQLNAFFSKSPNKDGILLSDFITQATSGEHTIVRGDGQSYQMFTDKTVY
EKGAPAAFPVKPEKYSEMKAVGYAVIGDPINGGYIWLNWRESILAYPFNS
NTAKITNHGAPTRWYYNGNIAPDGYDVFTVGIGINGDPGTDEATATSFMQ
SISSKPENYTNVTDTTKILEQLNRYFHTIVTEKKSIENGTITDPMGELID
LQLGTDGRFDPADYTLTANDGSRLENGQAVGGPQNDGGLLKNAKVFYDTT
EKRIRVTGLYLGTGEKVTLTYNVRLNDQFVSNKFYDTNGRTTLHPKEVEK
NTVRDFPIPKIRDVRKYPAITIAKEKKLGEIEFIKINKNDKKPLRDAVFS
LQKQHPDYPDIYGAIDQNGTYQNVRTGEDGKLTFKNLSDGKYRLFENSEP
AGYKPVQNKPIVAFQIVNGEVRDVTSIVPQDIPAGYEFTNDKHYITNEPI
PPKREYPRTGGIGMLPFYLIGCMMMGGVLLYTRKHP

[1187] ORF4_{—}19FTW is a cell wall surface protein. An example of an amino acid sequence of ORF4_{—}19FTW is set forth in SEQ ID NO: 224.

SEQ ID NO: 224

MKSINKFLTMLAALLLTASSLFSAATVFAAGTTTTSVTVHKLLATDGDMD
KIANELETGNYAGNKVGVLPANAKEIAGVMFVWTNTNNEIIDENGQTLGV
NIDPQTFKLSGAMPATAMKKLTEAEGAKFNTANLPAAKYKIYEIHSLSTY
VGEDGATLTGSKAVPIEIELPLNDVVDAHVYPKNTEAKPKIDKDFKGKAN
PDTPRVDKDTPVNHQVGDVVEYEIVTKIPALANYATANWSDRMTEGLAFN
KGTVKVTVDDVALEAGDYALTEVATGFDLKLTDAGLAKVNDQNAEKTVKI
TYSATLNDKAIVEVPESNDVTFNYGNNPDHGNTPKPNKPNENGDLTLTKT
WVDATGAPIPAGAEATFDLVNAQTGKVVQTVTLTTDKNTVTVNGLDKNTE
YKFVERSIKGYSADYQEITTAGEIAVKNWKDENPKPLDPTEPKVVTYGKK
FVKVNDKDNRLAGAEFVIANADNAGQYLARKADKVSQEEKQLVVTTKDAL
DRAVAAYNALTAQQQTQQEKEKVDKAQAAYNAAVIAANNAFEWVADKDNE
NVVKLVSDAQGRFEITGLLAGTYYLEETKQPAGYALLTSRQKFEVTATSY
SATGQGIEYTAGSGKDDATKVVNKKITIPQTGGIGTIIFAVAGAVIMGIA
VYAYVKNNKDEDQLA

[1188] ORF5_{—}19FTW is a cell wall surface protein. An example of an amino acid sequence of ORF5_{—}19FTW is set forth in SEQ ID NO: 225.

SEQ ID NO: 225

MTMQKMQKMISRIFFVMALCFSLVWGAHAVQAQEDHTLVLQLENYQEVVS
QLPSRDGHRLQVWKLDDSYSYDNRVQIVRDLHSWDENKLSSFKKTSFEMT
FLENQIEVSHIPNGLYYVRSIIQTDAVSYPAEFLFEMTDQTVEPLVIVAK
KADTVTTKVKLIKVDQDHNRLEGVGFKLVSVARDGSEKEVPLIGEYRYSS
SGQVGRTLYTDKNGEIVVTNLPLGTYRFKEVEPLAGYTVTTMDTDVQLVD
HQLVTITVVNQKLPRGNVDFMKVDGRTNTSLQGAMFKVMKEENGHYTPVL
QNGKEVVVASGKDGRFRVEGLEYGTYYLWELQAPTGYVQLTSPVSFTIGK
DTRKELVTVVKNNKRPRIDVPDTGEETLYILMLVAILLFGSGYYLTKKTN
N

[1189] ORF6_{—}19FTW is a putative sortase. An example of an amino acid sequence of ORF6_{—}19FTW is set forth in SEQ ID NO: 226.

SEQ ID NO: 226

MLIKMAKTKKQKRNNLLLGVVFFIGMAVMAYPLVSRLYYRVESNQQIADF
DKEKATLDEADIDERMKLAQAFNDSLNNVVSGDPWSEEMKKKGRAEYARM
LEIHERMGHVEIPAIDVDLPVYAGTAEEVLQQGAGHLEGTSLPIGGNSTH
AVITAHTGLPTAKMFTDLTKLKVGDKFYVHNIKEVMAYQVDQVKVIEPTN
FDDLLIVPGHDYVTLLTCTPYMINTHRLLVRGHRIPYVAEVEEEFIAANK
LSHLYRYLFYVAVGLIVILLWIIRRLRKKKRQSERALKALKEATKEVKVE
DE

[1190] ORF7_{—}19FTW is a putative sortase. An example of an amino acid sequence of ORF7_{—}19FTW is set forth in SEQ ID NO: 227.

SEQ ID NO: 227

MSKSRYSRKKSVKKKKNPFILLLIFLVGLAVAMYPLVSRYYYRIESNEVI
KEFDETVSQMDKAELEERWRLAQAFNATLKPSEILDPFTDQEKKQGVSEY
ANMLKVHERIGYVEIPAIEQEIPMYVGTSEDILQKGAGLLEGASLPVGGE
NTHTVITAHRGLPTAELFSQLDKMKKGDTFYLHVLDQVLAYQVDQIVTVE
PNDFEPVLIQHGQDYATLLTCTPYMINSHRLLVRGKRIPYTAPIAERNRA
VRERGQFWLWLLLGAMAVILLLLYRVYRNRRIVKGLEKQLEGRHVKD

[1191] ORF8_{—}19FTW is a putative sortase. An example of an amino acid sequence of ORF8_{—}19FTW is set forth in SEQ ID NO: 228.

SEQ ID NO: 228

MSRTKLRALLGYLLMLVACLIPIYCFGQMVLQSLGQVKGHATFVKSMTTE
MYQEQQNHSLAYNQRLASQNRIVDPFLAEGYEVNyQVSDDPDAVYGYLSI
PSLEIMEPVYLGADYHHLGMGLAHVDGTPLPLDGTGIRSVIAGHRAEPSH
VFFRHLDQLKVGDALYYDNGQEIVEYQMMDTEIILPSEWEKLESVSSKNI
MTLITCDFIPTFNKRLLVNFERVAVYQKSDPQTAAVARVAFTKEGQSVSR
VATSQWLYRGLVVLAFLGILFVLWKLARLLRGK

[1192] As discussed above, a S. pneumoniae AI sequence is present in the 23F Taiwan 15 S. pneumoniae genome. Examples of S. pneumoniae AI sequences from 23F Taiwan 15 are set forth below.

[1193] ORF2_{—}23FTW is a transcriptional regulator. An example of an amino acid sequence of ORF2_{—}23FTW is set forth in SEQ ID NO: 229.

SEQ ID NO: 229

MLNKYIEKRITDKITILNILLDIRSIELDELSTLTSLQSKSLLSILQELQ
ETFEEELTFNLDTQQVQLIEHHSHQTNYYFHQLYNQSTILKILRFFLLQG
NQSFNEFTQKEYISIATGYRVRQKCGLLLRSVGLDLVKNQVVGPEYRIRF
LIALLQFHFGIEIYDLNDGSMDWVTHMIVQSNSQLSHELLEITPDEYVHF
SILVALTWKRREFPLEFPESKEFEKLKNLFMYPILMEHCQTYLEPHANMT
FTQEELDYIFLVYCSANSSFSKDKWNQEKKTHTIQLILQHTRGKHLLSKF
KNILGNDISNSLSFLTALTFLTRTFLFGLQNLVPYYNYYEHYGIESDKPL
YHISKAIVQEWMTEQKIEGVIDQHRLYLFSLYLTETIFSSLPAIPIFIIL
NNQADVNLIKSIILRNFTDKVASVTGYNILISPPPSEEHLTEPLIIITTK
EYLPYVKKQYPKGKHHFLTIALDLHVSQQRLIYQTIVDIRKEAFDKRVA
MIAKKAHYLL

[1194] ORF3_{—}23FTW is a cell wall surface protein. An example of an amino acid sequence of ORF3_{—}23FTW is set forth in SEQ ID NO: 230.

SEQ ID NO: 230

MKKVRKIFQKAVAGLCCISQLTAFSSIVALAETPETSPAIGKVVIKETGE
GGALLGDAVFELKNNTDGTTVSQRTEAQTGEAIFSNIKPGTYTLTEAQPP
VGYKPSTKQWTVEVEKNGRTTVQGEQVENREEALSDQYPQTGTYPDVQTP
YQIIKVDGSEKNGQHKALNPNPYERVIPEGTLSKRIYQVNNLDDNQYGIE
LTVSGKTVYEQKDKSVPLDVVILLDNSNSMSNIRNKNARRAERAGEATRS
LIDKITSDPENRVALVTYASTIFDGTEFTVEKGVADKNGKRLNDSLFWNY
DQTSFTTNTKDYSYLKLTNDKNDIVELKNKVPTEAEDHDGNRLMYOFGAT
FTQKALMKADEILTQQARQNSQKVIFHITDGVPTMSYPINFNHATFAPSY
QNQLNAFFSKSPNKDGILLSDFITQATSGEHTIVRGDGQSYQMFTDKTVY
EKGAPAAFPVKPEKYSEMKAAGYAVIGDPINGGYIWLNWRESILAYPFNS
NTAKITNHGDPTRWYYNGNIAPDGYDVFTVGIGINGDPGTDEATATSFMQ
SISSKPENYTNVTDTTKILEQLNRYFHTIVTEKKSIENGTITDPMGELID
LQLGTDGRFDPADYTLTANDGSRLENGQAVGGPQNDGGLLKNAKVLYDTT
EKRIRVTGLYLGTDEKVTLTYNVRLNDEFVSNKFYDTNGRTTLHPKEVEQ
NTVRDFPIPKIRDVRKYPEITISKEKKLGDIEFIKVNKNDKKPLRDAVFS
LQKQHPDYPDIYGAIDQNGTYQNVRTGEDGKLTFKNLSDGKYRLFENSEP
AGYKPVQNKPIVAFQIVNGEVRDVTSIVPQDIPAGYEFTNDKHYITNEPI
PPKREYPRTGGIGMLPFYLIGCMMMGGVLLYTRKHP

[1195] ORF4_{—}23FTW is a cell wall surface protein. An example of an amino acid sequence of ORF4_{—}23FTW is set forth in SEQ ID NO: 231.

SEQ ID NO: 231

MKSINKFLTILAALLLTVSSLFSAATVFAAEQKTKTLTVHKLLMTDQELD
AWNSDAITTAGYDGSQNFEQFKQLQGVPQGVTEISGVAFELQSYTGPQGK
EQENLTNDAVWTAVNKGVTTETGVKFDTEVLQGTYRLVEVRKESTYVGPN
GKVLTGMKAVPALITLPLVNQNGVVENAHVYPKNSEDKPTATKTFDTAAG
FVDPGEKGLAIGTKVPYIVTTTIPKNSTLATAFWSDEMTEGLDYNGDVVV
NYNGQPLDNSHYTLEAGHNGFILKLNEKGLEAINGKDAEATITLKYTATL
NALAVADVPEANDVTFHYGNNPGHGNTPKPNKPKNGELTITKTWADAKDA
PIAGVEVTFDLVNAQTGEVVKVPGHETGIVLNQTNNWTFTATGLDNNTEY
KFVERTIKGYSADYQTITETGKIAVKNWKDENPEPINPEEPRVKTYGKKF
VKVDQKDERLKEAQFVVKNEQGKYLALKSAAQQAVNEKAAAEAKQALDAA
IAAYTNAADKNAAQAVVDAAQKTYNDNYRAARFGYVEVERKEDALVLTSN
TDGQFQISGLAAGSYTLEETKAPEGFAKLGDVKFEVGAGSWNQGDFNYLK
DVQKNDATKVVNKKITIPQTGGIGTIIFAVAGAVIMGIAVYAYVKNNKDE
DQLA

[symbol]

ORF5_{—}23FTW is set forth in SEQ ID NO: 232.

SEQ ID NO: 232

MTMQKMQKMISRIFFVMALCFSLVWGAHAVQAQEDHTLVLQLENYQEVVS
QLPSRDGHRLQVWKLDDSYSYDNRVQIVRDLHSWDENKLSSFKKTSFEMT
FLENQIEVSHIPNGLYYVRSIIQTDAVSYPAEFLFEMTDQTVEPLVIVAK
KADTVTTKVKLIKVDQDHNRLEGVGFKLVSVARDGSEKEVPLIGEYRYSS
SGQVGRTLYTDKNGEIVVTNLPLGTYRFKEVEPLAGYTVTTMDTDVQLVD
HQLVTITVVNQKLPRGNVDFMKVDGRTNTSLQGAMFKVMKEENGHYTPVL
QNGKEVVVASGKDGRFRVEGLEYGTYYLWELQAPTGYVQLTSPVSFTIGK
DTRKELVTVVKNNKRPRIDVPDTGEETLYILMLVAILLFGSGYYLTKKTN
N

[1196] ORF6_{—}23FTW is a putative sortase. An example of an amino acid sequence of ORF6_{—}23FTW is set forth in SEQ ID NO: 233.

SEQ ID NO: 233

MLIKMVKTKKQKRNNLLLGVVFFIGMAVMAYPLVSRLYYRVESNQQIADF
DKEKATLDEADIDERMKLAQAFNDSLNNVVSGDPWSEEMKKKGRAEYARM
LEIHERMGHVEIPVIDVDLPVYAGTAEEVLQQGAGQLEGTSLPIGGNSTH
AVITAHTGLPTAKMFTDLTKLKVGDKFYVHNIKEVMAYQVDQVKVIEPTN
FDDLLIVPGHDYVTLLTCTPYMINTHRLLVRGHRIPYVAEVEEEFIAANK
LSHLYRYLFYVAVGLIVILLWIIRRLRKKKKQPEKALKALKAARKEVKVE
DGQQ

[1197] ORF7_{—}23FTW is a putative sortase. An example of an amino acid sequence of ORF7_{—}23FTW is set forth in SEQ ID NO: 234.

SEQ ID NO: 234

MDNSRRSRKKGTKKKKHPLILLLIFLVGFAVAIYPLVSRYYYRIESNEVI
KEFDETVSQMDKAELEERWRLAQAFNATLKPSEILDPFTEQEKKKGVSEY
ANMLKVHERIGYVEIPAIDQEIPMYVGTSEEILQKGAGLLEGASLPVGGE
NTHTVVTAHRGLPTAELFSQLDKMKKGDVFYLHVLDQVLAYQVDQILTVE
PNDFEPVLIQRGKDYATLLTCTPYMINSHRLLVRGKRIPYTAPIAERNRA
VRERGQFWLWLLLAALVMILVLSYGVYRHRRIVKGLEKQLEEHHVKG

[1198] ORF8_{—}23FTW is a putative sortase. An example of an amino acid sequence of ORF8_{—}23FTW is set forth in SEQ ID NO: 235.

SEQ ID NO: 235

MSKAKLQKLLGYLLMLVALVIPVYCFGQMVLQSLGQVKGHEIFSESVTAD
SYQEQLQRSLDYNQRLDSQNRIVDPFLAEGYEVNYQVSDDPDAVYGYLSI
PSLEIMEPVYLGADYHHLAMGLAHVDGTPLPVEGKGIRSVIAGHRAEPSH
VFFRHLDQLKVGDALYYDNGQEIVEYQMMDTEIILPSEWEKLESVSSKNI
MTLITCDPIPTFNKRLLVNFERVAVYQKSDPQTAAVARVAFTKEGQSVSR
VATSQWLYRGLVVLAFLGILFVLWKLARLLRGK

[1199] As discussed above, a S. pneumoniae AI sequence is present in the 23F Poland 16 S. pneumoniae genome. Examples of S. pneumoniae AI sequences from 23F Poland 16 are set forth below.

[1200] ORF2_{—}23FP is a transcriptional regulator. An example of an amino acid sequence of ORF2_{—}23FP is set forth in SEQ ID NO: 236.

SEQ ID NO: 236

MLNKYIEKRITDKITILNILLDIRSIELDELSTLTSLQSKSLLSILQELQ
ETFEEELTFNLDTQQVQLIEHHSHQTNYYFHQLYNQSTILKILRFFLLQG
NQSFNEFTQKEYISIATGYRVRQKCGLLLRSVGLDLVKNQVVGPEYRIRF
LIALLQFHFGIEIYDLNDGSMDWVTHMIVQSNSQLSHELLEITPDEYVHF
SILVALTWKRREFPLEFPESKEFEKLKNLFMYPILMEHCQTYLEPHANMT
FTQEELDYIFLVYCSANSSFSKDKWNQEKKTHTIQLILQHTRGKHLLSKF
KNILGNDISNSLSFLTALTFLTRTFLFGLQNLVPYYNYYEHYGIESDKPL
YHISKAIVQEWMTEQKIEGVIDQHRLYLFSLYLTETIFSSLPAIPIFIIL
NNQADVNLIKSIILRNFTDKVASVTGYNILISPPPSEEHLTEPLIIITTK
EYLPYVKKQYPKGKHHFLTIALDLHVSQQRLIYQTIVDIRKEAFDKRVAM
IAKKAHYLL

[1201] ORF3_{—}23FP is a cell wall surface protein. An example of an amino acid sequence of ORF3_{—}23FP is set forth in SEQ ID NO: 237.

SEQ ID NO: 237

MKKVRKIFQKAVAGLGCISQLCAFSSIVALAETPETSPAIGKVVIKETGE
GGALLGDAVFELKNNTDGTTVSQRTEAQTGEAIFSNIKPGTYTLTEAQPP
VGYKPSTKQWTVEVEKNGRTTVQGEQVENREEALSDQYPQTGTYPDVQTP
YQIIKVDGSEKNGQHKALNPNPYERVIPEGTLSKRIYQVNNLDDNQYGIE
LTVSGKTTVETKEASTPLDVVILLDNSNSMSNIRHNHAHRAEKAGEATRA
LVDKITSNPDNRVALVTYGSTIFDGSEATVEKGVADANGKILNDSALWTF
DRTTFTAKTYNYSFLNLTSDPTDIQTIKDRIPSDAEELNKDKLMYQFGAT
FTQKALMTADDILTKQARPNSKKVIFHITDGVPTMSYPINFKYTGTTQSY
RTQLNNFKAKTPNSSGILLEDFVTWSADGEHKIVRGDGESYQMFTKKPVT
DQYGVHQILSITSMEQRAKLVSAGYRFYGTDLYLYWRDSILAYPFNSSTD
WITNHGDPTTWYYNGNMAQDGYDVFTVGVGVNGDPGTDEATATRFMQSIS
SSPDNYTNVADPSQILQELNRYFYTIVNEKKSIENGTITDPMGELIDFQL
GADGRFDPADYTLTANDGSSLVNNVPTGGPQNDGGLLKNAKVFYDTTEKR
IRVTGLYLGTGEKVTLTYNVRLNDQFVSNKFYDTNGRTTLHPKEVEKNTV
RDFPIPKIRDVRKYPEITIPKEKKLGEIEFIKINKNDKKPLRDAVFSLQK
QHPDYPDIYGAIDQNGTYQNVRTGEDGKLTFKNLSDGKYRLFENSEPAGY
KPVQNKPIVAFQIVNGEVRDVTSIVPQDIPAGYEFTNDKHYITNEPIPPK
REYPRTGGIGMLPFYLIGCMMMGGVLLYTRKNP

[1202] ORF4_{—}23FP is a cell wall surface protein. An example of an amino acid sequence of ORF4_{—}23FP is set forth in SEQ ID NO: 238.

SEQ ID NO: 238

MKSINKFLTMLAALLLTASSLFSAATVFAADNVSTAPDAVTKTLTIHKLL
LSEDDLKTWDTNGPKGYDGTQSSLKDLTGVVAEEIPNVYFELQKYNLTDG
KEKENLKDDSKWTTVHGGLTTKDGLKIETSTLKGVYRIREDRTKTTYVGP
NGQVLTGSKAVPALVTLPLVNNNGTVIDAHVFPKNSYNKPVVDKRIADTL
NYNDQNGLSIGTKIPYVVNTTIPSNATFATSFWSDEMTEGLTYNEDVTIT
LNNVAMDQADYEVTKGINGFNLKLTEAGLAKINGKDADQKIQITYSATLN
SLAVADIPESNDITYHYGNHQDHGNTPKPTKPNNGQITVTKTWDSQPAPE
GVKATVQLVNAKTGEKVGAPVELSENNWTYTWSGLDNSIEYKVEEEYNGY
SAEYTVESKGKLGVKNWKDNNPAPINLEEPRVKTYGKKFVKVDQKDTRLE
NAQFVVKKADSNKYIAFKSTAQQAADEKAAATAKQKLDAAVAAYTNAADK
QAAQALVDQAQQEYNVAYKEAKFGYVEVAGKDEAMVLTSNTDGQFQISGL
AAGTYKLEEIKAPEGFAKIDDVEFVVGAGSWNQGEFNYLKDVQKNDATKV
VNKKITIPQTGGIGTIIFAVAGAVIMGIAVYAYVKNNKDEDQLA

[1203] ORF5_{—}23FP is a cell wall surface protein. An example of an amino acid sequence of ORF5_{—}23FP is set forth in SEQ ID NO: 239.

SEQ ID NO: 239

MTMQKMQKMISRIFFVMALCFSLVWGAHAVQAQEDHTLVLQLENYQEVVS
QLPSRDGHRLQVWKLDDSYSYDNRVQIVRDLHSWDENKLSSFKKTSFEMT
FLENQIEVSHIPNGLYYVRSIIQTDAVSYPAEFLFEMTDQTVEPLVIVAK
KADTVTTKVKLIKVDQDHNRLEGVGFKLVSVARDGSEKEVPLIGEYRYSS
SGQVGRTLYTDKNGEIVVTNLPLGTYRFKEVEPLAGYAVTTMDTDVQLVD
HQLVTITVVNQKLPRGNVDFMKVDGRTNTSLQGAMFKVMKEENGHYTPVL
QNGKEVVVASGKDGRFRVEGLEYGTYYLWELQAPTGYVQLTSPVSFTIGK
DTRKELVTVVKNNKRPRIDVPDTGEETLYILMLVAILLFGSGYYLTKKTN
N

[1204] ORF6_{—}23FP is a putative sortase. An example of an amino acid sequence of ORF6_{—}23FP is set forth in SEQ ID NO: 240.

SEQ ID NO: 240

MLIKMAKTKKQKRNNLLLGVVFFIGIAVMAYPLVSRLYYRVESNQQIADF
DKEKATLDEADIDERMKLAQAFNDSLNNVVSGDPWSEEMKKKGRAEYARM
LEIHERMGHVEIPAIDVDLPVYAGTAEEVLQQGAGHLEGTSLPIGGNSTH
AVITAHTGLPTAKMFTDLTKLKVGDKFYVHNIKEVMAYQVDQVKVIEPTN
FDDLLIVPGHDYVTLLTCTPYMINTHRLLVRGHRIPYVAEVEEEFIAANK
LSHLYRYLFYVAVGLIVILLWIIRRLRKKKRQSERALKALKEATKEVKVE
DE

[1205] ORF7_{—}23FP is a putative sortase. An example of an amino acid sequence of ORF7_{—}23FP is set forth in SEQ ID NO: 241.

SEQ ID NO: 241

MSKSRYSRKKSVKKKKNPFILLLIFLVGLAVAMYPLVSRYYYRIESNEVI
KEFDETVSQMDKAELEERWRLAQAFNATLKPSEILDPFTEQEKKKGVSEY
ANMLKVHERIGYVEIPAIDQEIPMYVGTSEEILQKGAGLLEGASLPVGGE
NTHTVVTAHRGLPTAELFSQLDKMKKGDIFYLHVLDQVLAYQVDQIVTVE
PNDFEPVLIQHGEDYATLLTCTPYMINSHRLLVRGKRIPYTAPIAERNRA
VRERGQFWLWLLLGAMAVILLLLYRVYRNRRIVKGLEKQLEGRHVKD

[1206] ORF8_{—}23FP is a putative sortase. An example of an amino acid sequence of ORF8_{—}23FP is set forth in SEQ ID NO: 242.

SEQ ID NO: 242

MSRTKLRALLGYLLMLVACLIPIYCFGQMVLQSLGQVKGHATFVKSMTTE
MYQEQQNHSLAYNQRLASQNRIVDPFLAEGYEVNYQVSDDPDAVYGYLSI
PSLEIMEPVYLGADYHHLGMGLAHVDGTPLPLDGTGIRSVIAGHRAEPSH
VFFRHLDQLKVGDALYYDNGQEIVEYQMMDTEIILPSEWEKLESVSSKNI
MTLITCDPIPTFNKRLLVNFERVAVYQKSDPQTAAVARVAFTKEGQSVSR
VATSQWLYRGLVVLAFLGILFVLWKLARLLRGK

[1207] Immunogenic compositions of the invention comprising AI antigens may further comprise one or more antigenic agents. Preferred antigens include those listed below. Additionally, the compositions of the present invention may be used to treat or prevent infections caused by any of the below-listed microbes. Antigens for use in the immunogenic compositions include, but are not limited to, one or more of the following set forth below, or antigens derived from one or more of the following set forth below:

[1208] Bacterial Antigens

[1209] N. meningitides: a protein antigen from N. meningitides serogroup A, C, W135, Y, and/or B (1-7); an outer-membrane vesicle (OMV) preparation from N. meningitides serogroup B. (8, 9, 10, 11); a saccharide antigen, including LPS, from N. meningitides serogroup A, B, C W135 and/or Y, such as the oligosaccharide from serogroup C (see PCT/US99/09346; PCT IB98/01665; and PCT IB99/00103);

[1210] Streptococcus pneumoniae: a saccharide or protein antigen, particularly a saccharide from Streptococcus pneumoniae;

[1211] Streptococcus agalactiae: particularly, Group B streptococcus antigens;

[1212] Streptococcus pyogenes: particularly, Group A streptococcus antigens;

[1213] Enterococcus faecalis or Enterococcus faecium: Particularly a trisaccharide repeat or other Enterococcus derived antigens provided in U.S. Pat. No. 6,756,361;

[1214] Helicobacter pylori: including: Cag, Vac, Nap, HopX, HopY and/or urease antigen;

[1215] Bordetella pertussis: such as pertussis holotoxin (PT) and filamentous haemagglutinin (FHA) from B. pertussis, optionally also combination with pertactin and/or agglutinogens 2 and 3 antigen;

[1216] Staphylococcus aureus: including S. aureus type 5 and 8 capsular polysaccharides optionally conjugated to nontoxic recombinant Pseudomonas aeruginosa exotoxin A, such as StaphVAX™, or antigens derived from surface proteins, invasins (leukocidin, kinases, hyaluronidase), surface factors that inhibit phagocytic engulfment (capsule, Protein A), carotenoids, catalase production, Protein A, coagulase, clotting factor, and/or membrane-damaging toxins (optionally detoxified) that lyse eukaryotic cell membranes (hemolysins, leukotoxin, leukocidin);

[1217] Staphylococcus epidermis: particularly, S. epidermidis slime-associated antigen (SAA);

[1218] Staphylococcus saprophyticus: (causing urinary tract infections) particularly the 160 kDa hemagglutinin of S. saprophyticus antigen;

[1219] Pseudomonas aeruginosa: particularly, endotoxin A, Wzz protein, P. aeruginosa LPS, more particularly LPS isolated from PAO1 (O5 serotype), and/or Outer Membrane Proteins, including Outer Membrane Proteins F (OprF) (Infect Immun. 2001 May; 69(5): 3510-3515);

[symbol]

components (lethal factor (LF) and edema factor (EF)), both of which can share a common B-component known as protective antigen (PA);

[1220] Moraxella catarrhalis: (respiratory) including outer membrane protein antigens (HMW-OMP), C-antigen, and/or LPS;

[1221] Yersinia pestis (plague): such as F1 capsular antigen (Infect Immun. 2003 January; 71(1)): 374-383, LPS (Infect Immun. 1999 October; 67(10): 5395), Yersinia pestis V antigen (Infect Immun. 1997 November; 65(11): 4476-4482);

[1222] Yersinia enterocolitica (gastrointestinal pathogen): particularly LPS (Infect Immun. 2002 August; 70(8): 4414);

[1223] Yersinia pseudotuberculosis: gastrointestinal pathogen antigens;

[1224] Mycobacterium tuberculosis: such as lipoproteins, LPS, BCG antigens, a fusion protein of antigen 85B (Ag85B) and/or ESAT-6 optionally formulated in cationic lipid vesicles (Infect Immun. 2004 October; 72(10): 6148), Mycobacterium tuberculosis (Mtb) isocitrate dehydrogenase associated antigens (Proc Nat Acad Sci USA. 2004 Aug. 24; 101(34): 12652), and/or MPT51 antigens (Infect Immun. 2004 July; 72(7): 3829);

[1225] Legionella pneumophila (Legionnairs' Disease): L. pneumophila antigens—optionally derived from cell lines with disrupted asd genes (Infect Immun. 1998 May; 66(5): 1898);

[1226] Rickettsia: including outer membrane proteins, including the outer membrane protein A and/or B (OmpB) (Biochim Biophys Acta. 2004 Nov. 1; 1702(2):145), LPS, and surface protein antigen (SPA) (J Autoimmun. 1989 June; 2 Suppl:81);

[1227] E. coli: including antigens from enterotoxigenic E. coli (ETEC), enteroaggregative E. coli (EAggEC), diffusely adhering E. coli (DAEC), enteropathogenic E. coli (EPEC), and/or enterohemorrihagic E. coli (EHEC);

[1228] Vibrio cholerae: including proteinase antigens, LPS, particularly lipopolysaccharides of Vibrio cholerae II, O1 Inaba O-specific polysaccharides, V. cholera O139, antigens of IEM108 vaccine (Infect Immun. 2003 October; 71(10):5498-504), and/or Zonula occludens toxin (Zot);

[1229] Salmonella typhi (typhoid fever): including capsular polysaccharides preferably conjugates (Vi, i.e. vax-TyVi);

[1230] Salmonella typhimurium (gastroenteritis): antigens derived therefrom are contemplated for microbial and cancer therapies, including angiogenesis inhibition and modulation of flk;

[1231] Listeria monocytogenes (systemic infections in immunocompromised or elderly people, infections of fetus): antigens derived from L. monocytogenes are preferably used as carriers/vectors for intracytoplasmic delivery of conjugates/associated compositions of the present invention;

[1232] Porphyromonas gingivalis: particularly, P. gingivalis outer membrane protein (OMP);

[1233] Tetanus: such as tetanus toxoid (TT) antigens, preferably used as a carrier protein in conjunction/conjugated with the compositions of the present invention;

[symbol]

modulating, inhibiting or associated with ADP ribosylation are contemplated for combination/co-administration/conjugation with the compositions of the present invention, the diphtheria toxoids are preferably used as carrier proteins;

[1234] Borrelia burgdorferi (Lyme disease): such as antigens associated with P39 and P13 (an integral membrane protein, Infect Immun. 2001 May; 69(5): 3323-3334), VlsE Antigenic Variation Protein (J Clin Microbiol. 1999 December; 37(12): 3997);

[1235] Haemophilus influenzae B: such as a saccharide antigen therefrom;

[1236] Klebsiella: such as an OMP, including OMP A, or a polysaccharide optionally conjugated to tetanus toxoid;

[1237] Neiserria gonorrhoeae: including, a Por (or porin) protein, such as PorB (see Zhu et al., Vaccine (2004) 22:660-669), a transferring binding protein, such as TbpA and TbpB (See Price et al., Infection and Immunity (2004) 71(1):277-283), a opacity protein (such as Opa), a reduction-modifiable protein (Rmp), and outer membrane vesicle (OMV) preparations (see Plante et al., J Infectious Disease (2000) 182:848-855), also see e.g. WO99/24578, WO99/36544, WO99/57280, WO02/079243);

[1238] Chlamydia pneumoniae: particularly C. pneumoniae protein antigens;

[1239] Chlamydia trachomatis: including antigens derived from serotypes A, B, Ba and C are (agents of trachoma, a cause of blindness), serotypes L₁, L₂ & L₃ (associated with Lymphogranuloma venereum), and serotypes, D-K;

[1240] Treponema pallidum (Syphilis): particularly a TmpA antigen; and

[1241] Haemophilus ducreyi (causing chancroid): including outer membrane protein (DsrA).

[1242] Where not specifically referenced, further bacterial antigens of the invention may be capsular antigens, polysaccharide antigens or protein antigens of any of the above. Further bacterial antigens may also include an outer membrane vesicle (OMV) preparation. Additionally, antigens include live, attenuated, split, and/or purified versions of any of the aforementioned bacteria. The bacterial or microbial derived antigens of the present invention may be gram-negative or gram-positive and aerobic or anaerobic.

[1243] Additionally, any of the above bacterial-derived saccharides (polysaccharides, LPS, LOS or oligosaccharides) can be conjugated to another agent or antigen, such as a carrier protein (for example CRM₁₉₇). Such conjugation may be direct conjugation effected by reductive amination of carbonyl moieties on the saccharide to amino groups on the protein; as provided in U.S. Pat. No. 5,360,897 and Can J Biochem Cell Biol. 1984 May; 62(5):270-5. Alternatively, the saccharides can be conjugated through a linker, such as, with succinamide or other linkages provided in Bioconjugate Techniques, 1996 and CRC, Chemistry of Protein Conjugation and Cross-Linking, 1993.

[symbol]

[1244] Influenza: including whole viral particles (attenuated), split, or subunit comprising hemagglutinin (HA) and/or neuraminidase (NA) surface proteins, the influenza antigens may be derived from chicken embryos or propagated on cell culture, and/or the influenza antigens are derived from influenza type A, B, and/or C, among others;

[1245] Respiratory syncytial virus (RSV): including the F protein of the A2 strain of RSV (J Gen Virol. 2004 November; 85(Pt 11):3229) and/or G glycoprotein;

[1246] Parainfluenza virus (PIM: including PIV type 1, 2, and 3, preferably containing hemagglutinin, neuraminidase and/or fusion glycoproteins;

[1247] Poliovirus: including antigens from a family of picornaviridae, preferably poliovirus antigens such as OPV or, preferably IPV;

[1248] Measles: including split measles virus (MV) antigen optionally combined with the Protollin and or antigens present in MMR vaccine;

[1249] Mumps: including antigens present in MMR vaccine;

[1250] Rubella: including antigens present in MMR vaccine as well as other antigens from Togaviridae, including dengue virus;

[1251] Rabies: such as lyophilized inactivated virus (RabAvert™);

[1252] Flaviviridae viruses: such as (and antigens derived therefrom) yellow fever virus, Japanese encephalitis virus, dengue virus (types 1, 2, 3, or 4), tick borne encephalitis virus, and West Nile virus;

[1253] Caliciviridae; antigens therefrom;

[1254] HIV: including HIV-1 or HIV-2 strain antigens, such as gag (p24gag and p55gag), env (gp160 and gp41), pol, tat, nef, rev vpu, miniproteins, (preferably p55 gag and gp140v delete) and antigens from the isolates HIV_{IIIb}, HIV_{SF2}, HIV_{LAV}, HIV_{LAI}, HIV_{MN}, HIV-1_{CM235}, HIV-1_{US4}, HIV-2; simian immunodeficiency virus (SIV) among others;

[1255] Rotavirus: including VP4, VP5, VP6, VP7, VP8 proteins (Protein Expr Purif. 2004 December; 38(2):205) and/or NSP4;

[1256] Pestivirus: such as antigens from classical porcine fever virus, bovine viral diarrhoea virus, and/or border disease virus;

[1257] Parvovirus: such as parvovirus B19;

[1258] Coronavirus: including SARS virus antigens, particularly spike protein or proteases therefrom, as well as antigens included in WO 04/92360;

[1259] Hepatitis A virus: such as inactivated virus;

[1260] Hepatitis B virus: such as the surface and/or core antigens (sAg), as well as the presurface sequences, pre-S1 and pre-S2 (formerly called pre-S), as well as combinations of the above, such as sAg/pre-S1, sAg/pre-S2, sAg/pre-S1/pre-S2, and pre-S1/pre-S2, (see, e.g., AHBV Vaccines—Human Vaccines and Vaccination, pp. 159-176; and U.S. Pat. Nos. 4,722,840, 5,098,704, 5,324,513;

[symbol]

### Zhou et al., J. Virol. (1991) 65:5457-5464);

[1261] Hepatitis C virus: such as E1, E2, E1/E2 (see, Houghton et al., Hepatology (1991) 14:381), NS345 polyprotein, NS 345-core polyprotein, core, and/or peptides from the nonstructural regions (International Publication Nos. WO 89/04669; WO 90/11089; and WO 90/14436);

[1262] Delta hepatitis virus (HDV): antigens derived therefrom, particularly δ-antigen from HDV (see, e.g., U.S. Pat. No. 5,378,814);

[1263] Hepatitis E virus (HEV); antigens derived therefrom;

[1264] Hepatitis G virus (HGV); antigens derived therefrom;

[1265] Varcicella roster virus: antigens derived from varicella zoster virus (VZV) (J. Gen. Virol. (1986) 67:1759);

[1266] Epstein-Barr virus: antigens derived from EBV (Baer et al., Nature (1984) 310:207);

[1267] Cytomegalovirus: CMV antigens, including gB and gH (Cytomegaloviruses (J. K. McDougall, ed., Springer-Verlag 1990) pp. 125-169);

[1268] Herpes simplex virus: including antigens from HSV-1 or HSV-2 strains and glycoproteins gB, gD and gH (McGeoch et al., J. Gen. Virol. (1988) 69:1531 and U.S. Pat. No. 5,171,568);

[1269] Human Herpes Virus: antigens derived from other human herpes viruses such as HHV6 and HHV7; and

[1270] HPV: including antigens associated with or derived from human papillomavirus (HPV), for example, one or more of E1-E7, L1, L2, and fusions thereof, particularly the compositions of the invention may include a virus-like particle (VLP) comprising the L1 major capsid protein, more particular still, the HPV antigens are protective against one or more of HPV serotypes 6, 11, 16 and/or 18.

[1271] Further provided are antigens, compostions, methods, and microbes included in Vaccines, 4^{th} Edition (Plotkin and Orenstein ed. 2004); Medical Microbiology 4^{th} Edition (Murray et al. ed. 2002); Virology, 3rd Edition (W. K. Joklik ed. 1988); Fundamental Virology, 2nd Edition (B. N. Fields and D. M. Knipe, eds. 1991), which are contemplated in conjunction with the compositions of the present invention.

[1272] Additionally, antigens include live, attenuated, split, and/or purified versions of any of the aforementioned viruses.

### Fungal Antigens

[1273] Fungal antigens for use herein, associated with vaccines include those described in: U.S. Pat. Nos. 4,229,434 and 4,368,191 for prophylaxis and treatment of trichopytosis caused by Trichophyton mentagrophytes; U.S. Pat. Nos. 5,277,904 and 5,284,652 for a broad spectrum dermatophyte vaccine for the prophylaxis of dermatophyte infection in animals, such as guinea pigs, cats, rabbits, horses and lambs, these antigens comprises a suspension of killed T. equinum, T. mentagrophytes (var. granulare), M. canis and/or M. gypseum in an effective amount optionally combined with an adjuvant;

[symbol]

homogenized, formaldehyde-killed fungi, i.e., Microsporum canis culture in a carrier; U.S. Pat. No. 5,948,413 involving extracellular and intracellular proteins for pythiosis. Additional antigens identified within antifungal vaccines include Ringvac bovis LTF-130 and Bioveta.

[1274] Further, fungal antigens for use herein may be derived from Dermatophytres, including: Epidermophyton floccusum, Microsporum audouini, Microsporum canis, Microsporum distortum, Microsporum equinum, Microsporum gypsum, Microsporum nanum, Trichophyton concentricum, Trichophyton equinum, Trichophyton gallinae, Trichophyton gypseum, Trichophyton megnini, Trichophyton mentagrophytes, Trichophyton quinckeanum, Trichophyton rubrum, Trichophyton schoenleini, Trichophyton tonsurans, Trichophyton verrucosum, T. verrucosum var. album, var. discoides, var. ochraceum, Trichophyton violaceum, and/or Trichoplyton faviforme.

[1275] Fungal pathogens for use as antigens or in derivation of antigens in conjunction with the compositions of the present invention comprise Aspergillus fumigatus, Aspergillus flavus, Aspergillus niger, Aspergillus nidulans, Aspergillus terreus, Aspergillus sydowi, Aspergillus flavatus, Aspergillus glaucus, Blastoschizomyces capitatus, Candida albicans, Candida enolase, Candida tropicalis, Candida glabrata, Candida krusei, Candida parapsilosis, Candida stellatoidea, Candida kusei, Candida parakwsei, Candida lusitaniae, Candida pseudotropicalis, Candida guilliermondi, Cladosporium carrionii, Coccidioides immitis, Blastomyces dermatidis, Cryptococcus neoformans, Geotrichum clavatum, Histoplasma capsulatum, Klebsiella pneumoniae, Paracoccidioides brasiliensis, Pneumocystis carinii, Pythiumn insidiosum, Pityrosporum ovale, Saccharomyces cerevisae, Saccharomyces boulardii, Saccharomyces pombe, Scedosporium apiosperum, Sporothrix schenckii, Trichosporon beigelii, Toxoplasma gondii, Penicillium marneffei Malassezia spp., Fonsecaea spp., Wangiella spp., Sporothrix spp., Basidiobolus spp., Conidiobolus spp., Rhizopus spp, Mucor spp, Absidia spp, Mortierella spp, Cunninghamella spp, and Saksenaea spp.

[1276] Other fungi from which antigens are derived include Alternaria spp, Curvularia spp, Helminthosporium spp, Fusarium spp, Aspergillus spp, Penicillium spp, Monolinia spp, Rhizoctonia spp, Paecilomyces spp, Pithomyces spp, and Cladosporium spp.

[1277] Processes for producing a fungal antigens are well known in the art (see U.S. Pat. No. 6,333,164). In a preferred method a solubilized fraction extracted and separated from an insoluble fraction obtainable from fungal cells of which cell wall has been substantially removed or at least partially removed, characterized in that the process comprises the steps of obtaining living fungal cells; obtaining fungal cells of which cell wall has been substantially removed or at least partially removed; bursting the fungal cells of which cell wall has been substantially removed or at least partially removed; obtaining an insoluble fraction; and extracting and separating a solubilized fraction from the insoluble fraction.

[symbol]

[1278] In particular embodiments, microbes (bacteria, viruses and/or fungi) against which the present compositions and methods can be implement include those that cause sexually transmitted diseases (STDs) and/or those that display on their surface an antigen that can be the target or antigen composition of the invention. In a preferred embodiment of the invention, compositions are combined with antigens derived from a viral or bacterial STD. Antigens derived from bacteria or viruses can be administered in conjunction with the compositions of the present invention to provide protection against at least one of the following STDs, among others: chlamydia, genital herpes, hepatitis (particularly HCV), genital warts, gonorrhoea, syphilis and/or chancroid (See, WO00/15255).

[1279] In another embodiment the compositions of the present invention are co-administered with an antigen for the prevention or treatment of an STD.

[1280] Antigens derived from the following viruses associated with STDs, which are described in greater detail above, are preferred for co-administration with the compositions of the present invention: hepatitis (particularly HCV), HPV, HIV, or HSV.

[1281] Additionally, antigens derived from the following bacteria associated with STDs, which are described in greater detail above, are preferred for co-administration with the compositions of the present invention: Neiserria gonorrhoeae, Chlamydia pneumoniae, Chlamydia trachomatis, Treponema pallidum, or Haemophilus ducreyi.

[1282] Respiratory Antigens

[1283] The antigen may be a respiratory antigen and could further be used in an immunogenic composition for methods of preventing and/or treating infection by a respiratory pathogen, including a virus, bacteria, or fingi such as respiratory syncytial virus (RSV), PIV, SARS virus, influenza, Bacillus anthracis, particularly by reducing or preventing infection and/or one or more symptoms of respiratory virus infection. A composition comprising an antigen described herein, such as one derived from a respiratory virus, bacteria or fungus is administered in conjunction with the compositions of the present invention to an individual which is at risk of being exposed to that particular respiratory microbe, has been exposed to a respiratory microbe or is infected with a respiratory virus, bacteria or fungus. The composition(s) of the present invention is/are preferably co-administered at the same time or in the same formulation with an antigen of the respiratory pathogen. Administration of the composition results in reduced incidence and/or severity of one or more symptoms of respiratory infection.

[1284] Pediatric/Geriatric Antigens

[1285] In one embodiment the compositions of the present invention are used in conjunction with an antigen for treatment of a pediatric population, as in a pediatric antigen. In a more particular embodiment the pediatric population is less than about 3 years old, or less than about 2 years, or less than about 1 years old. In another embodiment the pediatric antigen (in conjunction with the composition of the present invention) is administered multiple times over at least 1, 2, or 3 years.

[symbol]

an antigen for treatment of a geriatric population, as in a geriatric antigen.

[1286] Other Antigens

[1287] Other antigens for use in conjunction with the compositions of the present include hospital acquired (nosocomial) associated antigens.

[1288] In another embodiment, parasitic antigens are contemplated in conjunction with the compositions of the present invention. Examples of parasitic antigens include those derived from organisms causing malaria and/or Lyme disease.

[1289] In another embodiment, the antigens in conjunction with the compositions of the present invention are associated with or effective against a mosquito born illness. In another embodiment, the antigens in conjunction with the compositions of the present invention are associated with or effective against encephalitis. In another embodiment the antigens in conjunction with the compositions of the present invention are associated with or effective against an infection of the nervous system.

[1290] In another embodiment, the antigens in conjunction with the compositions of the present invention are antigens transmissible through blood or body fluids.

[1291] Antigen Formulations

[1292] In other aspects of the invention, methods of producing microparticles having adsorbed antigens are provided. The methods comprise: (a) providing an emulsion by dispersing a mixture comprising (i) water, (ii) a detergent, (iii) an organic solvent, and (iv) a biodegradable polymer selected from the group consisting of a poly(α-hydroxy acid), a polyhydroxy butyric acid, a polycaprolactone, a polyorthoester, a polyanhydride, and a polycyanoacrylate. The polymer is typically present in the mixture at a concentration of about 1% to about 30% relative to the organic solvent, while the detergent is typically present in the mixture at a weight-to-weight detergent-to-polymer ratio of from about 0.00001:1 to about 0.1:1 (more typically about 0.0001:1 to about 0.1:1, about 0.001:1 to about 0.1:1, or about 0.005:1 to about 0.1:1); (b) removing the organic solvent from the emulsion; and (c) adsorbing an antigen on the surface of the microparticles. In certain embodiments, the biodegradable polymer is present at a concentration of about 3% to about 10% relative to the organic solvent.

[1293] Microparticles for use herein will be formed from materials that are sterilizable, non-toxic and biodegradable. Such materials include, without limitation, poly(α-hydroxy acid), polyhydroxybutyric acid, polycaprolactone, polyorthoester, polyanhydride, PACA, and polycyanoacrylate. Preferably, microparticles for use with the present invention are derived from a poly(α-hydroxy acid), in particular, from a poly(lactide) (“PLA”) or a copolymer of D,L-lactide and glycolide or glycolic acid, such as a poly(D,L-lactide-co-glycolide) (“PLG” or “PLGA”), or a copolymer of D,L-lactide and caprolactone. The microparticles may be derived from any of various polymeric starting materials which have a variety of molecular weights and, in the case of the copolymers such as PLG, a variety of lactide:glycolide ratios, the selection of which will be largely a

[symbol]

discussed more fully below.

[1294] Further antigens may also include an outer membrane vesicle (OMV) preparation.

[1295] Additional formulation methods and antigens (especially tumor antigens) are provided in U.S. patent Ser. No. 09/581,772.

### ANTIGEN REFERENCES

[1296] The following references include antigens useful in conjunction with the compositions of the present invention:
[1297] 1 International patent application WO99/24578
[1298] 2 International patent application WO99/36544.
[1299] 3 International patent application WO99/57280.
[1300] 4 International patent application WO00/22430.
[1301] 5 Tettelin et al. (2000) Science 287:1809-1815.
[1302] 6 International patent application WO96/29412.
[1303] 7 Pizza et al. (2000) Science 287:1816-1820.
[1304] 8 PCT WO 01/52885.
[1305] 9 Bjune et al. (1991) Lancet 338(8775).
[1306] 10 Fuskasawa et al. (1999) Vaccine 17:2951-2958.
[1307] 11 Rosenqist et al. (1998) Dev. Biol. Strand 92:323-333.
[1308] 12 Constantino et al. (1992) Vaccine 10:691-698.
[1309] 13 Constantino et al. (1999) Vaccine 17:1251-1263.
[1310] 14 Watson (2000) Pediatr Infect Dis J 19:331-332.
[1311] 15 Rubin (20000) Pediatr Clin North Am 47:269-285,v.
[1312] 16 Jedrzejas (2001) Microbiol Mol Biol Rev 65:187-207.
[1313] 17 International patent application filed on 3 Jul. 2001 claiming priority from GB-0016363.4; WO 02/02606; PCT IB/01/00166.
[1314] 18 Kalman et al. (1999) Nature Genetics 21:385-389.
[1315] 19 Read et al. (2000) Nucleic Acids Res 28:1397-406.
[1316] 20 Shirai et al. (2000) J. Infect. Dis 181(Suppl 3):S524S527.
[1317] 21 International patent application WO99/27105.
[1318] 22 International patent application WO00/27994.
[1319] 23 International patent application WO00/37494.
[1320] 24 International patent application WO99/28475.
[1321] 25 Bell (2000) Pediatr Infect Dis J 19:1187-1188.
[1322] 26 Iwarson (1995) APMIS 103:321-326.
[1323] 27 Gerlich et al. (1990) Vaccine 8 Suppl:S63-68 & 79-80.
[1324] 28 Hsu et al. (1999) Clin Liver Dis 3:901-915.
[1325] 29 Gastofsson et al. (1996) N. Engl. J. Med. 334-:349-355.
[1326] 30 Rappuoli et al. (1991) TIBTECH 9:232-238.
[1327] 31 Vaccines (1988) eds. Plotkin & Mortimer. ISBN 0-7216-1946-0.
[1328] 32 Del Guidice et al. (1998) Molecular Aspects of Medicine 19:1-70.
[1329] 33 International patent application WO93/018150.
[1330] 34 International patent application WO99/53310.
[1331] 35 International patent application WO98/04702.
[1332] 36 Ross et al. (2001) Vaccine 19:135-142.
[1333] 37 Sutter et al. (2000) Pediatr Clin North Am 47:287-308.
[1334] 38 Zimmerman & Spann (1999) Am Fan Physician 59:113-118, 125-126.
[1335] 39 Dreensen (1997) Vaccine 15 Suppl”S2-6.
[1336] 40 MMWR Morb Mortal Wkly rep 1998 January 16:47(1):12, 9.
[1337] 41 McMichael (2000) Vaccine 19 Suppl 1:S101-107. [symbol]
[1338] 43 GB patent applications 0026333.5, 0028727.6 & 0105640.7.
[1339] 44 Dale (1999) Infect Disclin North Am 13:227-43, viii.
[1340] 45 Ferretti et al. (2001) PNAS USA 98: 4658-4663.
[1341] 46 Kuroda et al. (2001) Lancet 357(9264): 1225-1240; see also pages 1218-1219.
[1342] 47 Ramsay et al. (2001) lancet 357(9251):195-196.
[1343] 48 Lindberg (1999) Vaccine 17 Suppl 2:S28-36.
[1344] 49 Buttery & Moxon (2000) J R Coil Physicians Long 34:163-168.
[1345] 50 Ahmad & Chapnick (1999) Infect-Dis Clin North Am 13:113-133, vii.
[1346] 51 Goldblatt (1998) J. Med. Microbiol. 47:663-567.
[1347] 52 European patent 0 477 508.
[1348] 53 U.S. Pat. No. 5,306,492.
[1349] 54 International patent application WO98/42721.
[1350] 55 Conjugate Vaccines (eds. Cruse et al.) ISBN 3805549326, particularly vol. 10:48-114.
[1351] 56 Hermanson (1996) Bioconjugate Techniques ISBN: 012323368 & 012342335X.
[1352] 57 European patent application 0372501.
[1353] 58 European patent application 0378881.
[1354] 59 European patent application 0427347.
[1355] 60 International patent application WO93/17712.
[1356] 61 International patent application WO98/58668.
[1357] 62 European patent application 0471177.
[1358] 63 International patent application WO00/56360.
[1359] 64 International patent application WO00/67161.

[1360] The contents of all of the above cited patents, patent applications and journal articles are incorporated by reference as if set forth fully herein.

[1361] There may be an upper limit to the number of Gram positive bacterial proteins which will be in the compositions of the invention. Preferably, the number of Gram positive bacterial proteins in a composition of the invention is less than 20, less than 19, less than 18, less than 17, less than 16, less than 15, less than 14, less than 13, less than 12, less than 11, less than 10, less than 9, less than 8, less than 7, less than 6, less than 5, less than 4, or less than 3. Still more preferably, the number of Gram positive bacterial proteins in a composition of the invention is less than 6, less than 5, or less than 4. Still more preferably, the number of Gram positive bacterial proteins in a composition of the invention is 3.

[1362] The Gram positive bacterial proteins and polynucleotides used in the invention are preferably isolated, i.e., separate and discrete, from the whole organism with which the molecule is found in nature or, when the polynucleotide or polypeptide is not found in nature, is sufficiently free of other biological macromolecules so that the polynucleotide or polypeptide can be used for its intended purpose.

### Fusion Proteins: GBS AI Sequences

[1363] The GBS AI proteins used in the invention may be present in the composition as individual separate polypeptides, but it is preferred that at least two (i.e. 2, 3, 4, 5, 6, 7, 8, 9, 10, 11, 12, 13, 14, 15, 16, 17, or 18) of the antigens are expressed as a single polypeptide chain (a “hybrid” or “fusion” polypeptide). Such fusion polypeptides offer two principal advantages: first, a polypeptide that may be unstable or poorly expressed on its own can be assisted by adding a suitable fusion partner that

[symbol]

purification need be employed in order to produce two polypeptides which are both antigenically useful.

[1364] The fusion polypeptide may comprise one or more AI polypeptide sequences. Preferably, the fusion comprises an AI surface protein sequence. Preferably, the fusion polypeptide includes one or more of GBS 80, GBS 104, and GBS 67. Most preferably, the fusion peptide includes a polypeptide sequence from GBS 80. Accordingly, the invention includes a fusion peptide comprising a first amino acid sequence and a second amino acid sequence, wherein said first and second amino acid sequences are selected from a GBS AI surface protein or a fragment thereof. Preferably, the first and second amino acid sequences in the fusion polypeptide comprise different epitopes.

[1365] Hybrids (or fusions) consisting of amino acid sequences from two, three, four, five, six, seven, eight, nine, or ten GBS antigens are preferred. In particular, hybrids consisting of amino acid sequences from two, three, four, or five GBS antigens are preferred.

[1366] Different hybrid polypeptides may be mixed together in a single formulation. Within such combinations, a GBS antigen may be present in more than one hybrid polypeptide and/or as a non-hybrid polypeptide. It is preferred, however, that an antigen is present either as a hybrid or as a non-hybrid, but not as both.

[1367] Hybrid polypeptides can be represented by the formula NH₂-A-{—X-L-}ₙ-B—COOH, wherein: X is an amino acid sequence of a GBS AI protein or a fragment thereof; L is an optional linker amino acid sequence; A is an optional N-terminal amino acid sequence; B is an optional C-terminal amino acid sequence; and n is 2, 3, 4, 5, 6, 7, 8, 9, 10, 11, 12, 13, 14 or 15.

[1368] If a —X— moiety has a leader peptide sequence in its wild-type form, this may be included or omitted in the hybrid protein. In some embodiments, the leader peptides will be deleted except for that of the —X— moiety located at the N-terminus of the hybrid protein i.e. the leader peptide of X₁ will be retained, but the leader peptides of X₂ . . . Xₙ will be omitted. This is equivalent to deleting all leader peptides and using the leader peptide of X₁ as moiety -A-.

[1369] For each n instances of {-X-L-}, linker amino acid sequence -L- may be present or absent. For instance, when n=2 the hybrid may be NH₂—X₁-L₁-X₂-L₂-COOH, NH₂—X₁-X₂—COOH, NH₂—X₁-L₁-X₂—COOH, NH₂—X₁-X₂-L₂-COOH, etc. Linker amino acid sequence(s) -L- will typically be short (e.g. 20 or fewer amino acids i.e. 19, 18, 17, 16, 15, 14, 13, 12, 11, 10, 9, 8, 7, 6, 5, 4, 3, 2, 1). Examples comprise short peptide sequences which facilitate cloning, poly-glycine linkers (i.e. comprising Glyₙ where n=2, 3, 4, 5, 6, 7, 8, 9, 10 or more), and histidine tags (i.e. Hisₙ where n=3, 4, 5, 6, 7, 8, 9, 10 or more). Other suitable linker amino acid sequences will be apparent to those skilled in the art. A useful linker is GSGGGG, with the Gly-Ser dipeptide being formed from a BamHI restriction site, thus aiding cloning and manipulation, and the (Gly)₄ tetrapeptide being a typical poly-glycine linker.

[1370] -A- is an optional N-terminal amino acid sequence. This will typically be short (e.g. 40 or fewer amino acids i.e. 39, 38, 37, 36, 35, 34, 33, 32, 31, 30, 29, 28, 27, 26, 25, 24, 23, 22, 21, 20, 19,

[symbol]

protein trafficking, or short peptide sequences which facilitate cloning or purification (e.g. histidine tags i.e. Hisₙ where n=3, 4, 5, 6, 7, 8, 9, 10 or more). Other suitable N-terminal amino acid sequences will be apparent to those skilled in the art. If X₁ lacks its own N-terminus methionine, -A- is preferably an oligopeptide (e.g. with 1, 2, 3, 4, 5, 6, 7 or 8 amino acids) which provides a N-terminus methionine.

[1371] —B— is an optional C-terminal amino acid sequence. This will typically be short (e.g. 40 or fewer amino acids i.e. 39, 38, 37, 36, 35, 34, 33, 32, 31, 30, 29, 28, 27, 26, 25, 24, 23, 22, 21, 20, 19, 18, 17, 16, 15, 14, 13, 12, 11, 10, 9, 8, 7, 6, 5, 4, 3, 2, 1). Examples include sequences to direct protein trafficking, short peptide sequences which facilitate cloning or purification (e.g. comprising histidine tags i.e. Hisₙ where n=3, 4, 5, 6, 7, 8, 9, 10 or more), or sequences which enhance protein stability. Other suitable C-terminal amino acid sequences will be apparent to those skilled in the art.

[1372] Most preferably, n is 2 or 3.

### Fusion Proteins: Gram Positive Bacteria AI Sequences

[1373] The Gram positive bacteria AI proteins used in the invention may be present in the composition as individual separate polypeptides, but it is preferred that at least two (i.e. 2, 3, 4, 5, 6, 7, 8, 9, 10, 11, 12, 13, 14, 15, 16, 17, or 18) of the antigens are expressed as a single polypeptide chain (a “hybrid” or “fusion” polypeptide). Such fusion polypeptides offer two principal advantages: first, a polypeptide that may be unstable or poorly expressed on its own can be assisted by adding a suitable fusion partner that overcomes the problem; second, commercial manufacture is simplified as only one expression and purification need be employed in order to produce two polypeptides which are both antigenically useful.

[1374] The fusion polypeptide may comprise one or more AI polypeptide sequences. Preferably, the fusion comprises an AI surface protein sequence. Accordingly, the invention includes a fusion peptide comprising a first amino acid sequence and a second amino acid sequence, wherein said first and second amino acid sequences are selected from a Gram positive bacteria AI protein or a fragment thereof. Preferably, the first and second amino acid sequences in the fusion polypeptide comprise different epitopes.

[1375] Hybrids (or fusions) consisting of amino acid sequences from two, three, four, five, six, seven, eight, nine, or ten Gram positive bacteria antigens are preferred. In particular, hybrids consisting of amino acid sequences from two, three, four, or five Gram positive bacteria antigens are preferred.

[1376] Different hybrid polypeptides may be mixed together in a single formulation. Within such combinations, a Gram positive bacteria AI sequence may be present in more than one hybrid polypeptide and/or as a non-hybrid polypeptide. It is preferred, however, that an antigen is present either as a hybrid or as a non-hybrid, but not as both.

[1377] Hybrid polypeptides can be represented by the formula NH₂-A-{-X-L-}ₙ-B—COOH, wherein: X is an amino acid sequence of a Gram positive bacteria AI sequence or a fragment thereof; L is an

[symbol]

optional C-terminal amino acid sequence; and n is 2, 3, 4, 5, 6, 7, 8, 9, 10, 11, 12, 13, 14 or 15.

[1378] If a —X— moiety has a leader peptide sequence in its wild-type form, this may be included or omitted in the hybrid protein. In some embodiments, the leader peptides will be deleted except for that of the —X— moiety located at the N-terminus of the hybrid protein i.e. the leader peptide of X₁ will be retained, but the leader peptides of X₂ . . . Xₙ will be omitted. This is equivalent to deleting all leader peptides and using the leader peptide of X₁ as moiety -A-.

[1379] For each n instances of {-X-L-}, linker amino acid sequence -L- may be present or absent. For instance, when n=2 the hybrid may be NH₂—X₁-L₁-X₂-L₂-COOH, NH₂—X₁-X₂—COOH, NH₂—X₁-L₁-X₂—COOH, —NH₂—X₁-X₂-L₂-COOH, etc. Linker amino acid sequence(s) -L- will typically be short (e.g. 20 or fewer amino acids i.e. 19, 18, 17, 16, 15, 14, 13, 12, 11, 10, 9, 8, 7, 6, 5, 4, 3, 2, 1). Examples comprise short peptide sequences which facilitate cloning, poly-glycine linkers (i.e. comprising Glyₙ where n=2, 3, 4, 5, 6, 7, 8, 9, 10 or more), and histidine tags (i.e. Hisₙ where n=3, 4, 5, 6, 7, 8, 9, 10 or more). Other suitable linker amino acid sequences will be apparent to those skilled in the art. A useful linker is GSGGGG, with the Gly-Ser dipeptide being formed from a BamHI restriction site, thus aiding cloning and manipulation, and the (Gly)₄ tetrapeptide being a typical poly-glycine linker.

[1380] -A- is an optional N-terminal amino acid sequence. This will typically be short (e.g. 40 or fewer amino acids i.e. 39, 38, 37, 36, 35, 34, 33, 32, 31, 30, 29, 28, 27, 26, 25, 24, 23, 22, 21, 20, 19, 18, 17, 16, 15, 14, 13, 12, 11, 10, 9, 8, 7, 6, 5, 4, 3, 2, 1). Examples include leader sequences to direct protein trafficking, or short peptide sequences which facilitate cloning or purification (e.g. histidine tags i.e. Hisₙ where n=3, 4, 5, 6, 7, 8, 9, 10 or more). Other suitable N-terminal amino acid sequences will be apparent to those skilled in the art. If X₁ lacks its own N-terminus methionine, -A- is preferably an oligopeptide (e.g. with 1, 2, 3, 4, 5, 6, 7 or 8 amino acids) which provides a N-terminus methionine.

[1381] —B— is an optional C-terminal amino acid sequence. This will typically be short (e.g. 40 or fewer amino acids i.e. 39, 38, 37, 36, 35, 34, 33, 32, 31, 30, 29, 28, 27, 26, 25, 24, 23, 22, 21, 20, 19, 18, 17, 16, 15, 14, 13, 12, 11, 10, 9, 8, 7, 6, 5, 4, 3, 2, 1). Examples include sequences to direct protein trafficking, short peptide sequences which facilitate cloning or purification (e.g. comprising histidine tags i.e. Hisₙ where n=3, 4, 5, 6, 7, 8, 9, 10 or more), or sequences which enhance protein stability. Other suitable C-terminal amino acid sequences will be apparent to those skilled in the art.

[1382] Most preferably, n is 2 or 3.

### Antibodies: GBS AI Sequences

[1383] The GBS AI proteins of the invention may also be used to prepare antibodies specific to the GBS AI proteins. The antibodies are preferably specific to the an oligomeric or hyper-oligomeric form of an AI protein. The invention also includes combinations of antibodies specific to GBS AI proteins selected to provide protection against an increased range of GBS serotypes and strain isolates. For example, a combination may comprise a first and second antibody, wherein said first

[symbol]

protein. Preferably, the nucleic acid sequence encoding said first GBS AI protein is not present in a GBS genome comprising a polynucleotide sequence encoding for said second GBS AI protein. Preferably, the nucleic acid sequence encoding said first and second GBS AI proteins are present in the genomes of multiple GBS serotypes and strain isolates.

[1384] The GBS specific antibodies of the invention include one or more biological moieties that, through chemical or physical means, can bind to or associate with an epitope of a GBS polypeptide. The antibodies of the invention include antibodies which specifically bind to a GBS AI protein. The invention includes antibodies obtained from both polyclonal and monoclonal preparations, as well as the following: hybrid (chimeric) antibody molecules (see, for example, Winter et al. (1991) Nature 349: 293-299; and U.S. Pat. No. 4,816,567; F(ab′)₂ and F(ab) fragments; F, molecules (non-covalent heterodimers, see, for example, Inbar et al. (1972) Proc Natl Acad Sci USA 69:2659-2662; and Ehrlich et al. (1980) Biochem 19:4091-4096); single-chain Fv molecules (sFv) (see, for example, Huston et al. (1988) Proc Natl Acad Sci USA 85:5897-5883); dimeric and trimeric antibody fragment constructs; minibodies (see, e.g., Pack et al. (1992) Biochem 31:1579-1584; Cumber et al. (1992) J Immunology 149B: 120-126); humanized antibody molecules (see, for example, Riechmann et al. (1988) Nature 332:323-327; Verhoeyan et al. (1988) Science 239:1534-1536; and U.K. Patent Publication No. GB 2,276,169, published 21 Sep. 1994); and, any functional fragments obtained from such molecules, wherein such fragments retain immunological binding properties of the parent antibody molecule. The invention further includes antibodies obtained through non-conventional processes, such as phage display.

[1385] Preferably, the GBS specific antibodies of the invention are monoclonal antibodies. Monoclonal antibodies of the invention include an antibody composition having a homogeneous antibody population. Monoclonal antibodies of the invention may be obtained from murine hybridomas, as well as human monoclonal antibodies obtained using human rather than murine hybridomas. See, e.g., Cote, et al. Monoclonal Antibodies and Cancer Therapy, Alan R. Liss, 1985, p 77.

[1386] The antibodies of the invention may be used in diagnostic applications, for example, to detect the presence or absence of GBS in a biological sample. The antibodies of the invention may also be used in the prophylactic or therapeutic treatment of GBS infection.

### Antibodies: Gram Positive Bacteria AI Sequences

[1387] The Gram positive bacteria AI proteins of the invention may also be used to prepare antibodies specific to the Gram positive bacteria AI proteins. The antibodies are preferably specific to the an oligomeric or hyper-oligomeric form of an AI protein. The invention also includes combinations of antibodies specific to Gram positive bacteria AI proteins selected to provide protection against an increased range of Gram positive bacteria genus, species, serotypes and strain isolates.

[symbol]

antibody is specific to a first Gram positive bacteria AI protein and said second antibody is specific to a second Gram positive bacteria AI protein. Preferably, the nucleic acid sequence encoding said first Gram positive bacteria AI protein is not present in a Gram positive bacterial genome comprising a polynucleotide sequence encoding for said second Gram positive bacteria AI protein. Preferably, the nucleic acid sequence encoding said first and second Gram positive bacteria AI proteins are present in the genomes of multiple Gram positive bacteria genus, species, serotypes or strain isolates.

[1388] As an example of an instance where the combination of antibodies provides protection against an increased range of bacteria serotypes, the first antibody may be specific to a first GAS AI protein and the second antibody may be specific to a second GAS AI protein. The first GAS AI protein may comprise a GAS AI-1 surface protein, while the second GAS AI protein may comprise a GAS AI-2 or AI-3 surface protein.

[1389] As an example of an instance where the combination of antibodies provides protection against an increased range of bacterial species, the first antibody may be specific to a GBS AI protein and the second antibody may be specific to a GAS AI protein. Alternatively, the first antibody may be specific to a GAS AI protein and the second antibody may be specific to a S. pneumoniae AI protein.

[1390] The Gram positive specific antibodies of the invention include one or more biological moieties that, through chemical or physical means, can bind to or associate with an epitope of a Gram positive bacteria AI polypeptide. The antibodies of the invention include antibodies which specifically bind to a Gram positive bacteria AI protein. The invention includes antibodies obtained from both polyclonal and monoclonal preparations, as well as the following: hybrid (chimeric) antibody molecules (see, for example, Winter et al. (1991) Nature 349: 293-299; and U.S. Pat. No. 4,816,567; F(ab)₂ and F(ab) fragments; F, molecules (non-covalent heterodimers, see, for example, Inbar et al. (1972) Proc Natl Acad Sci USA 69:2659-2662; and Ehrlich et al. (1980) Biochem 19:4091-4096); single-chain Fv molecules (sFv) (see, for example, Huston et al. (1988) Proc Natl Acad Sci USA 85:5897-5883); dimeric and trimeric antibody fragment constructs; minibodies (see, e.g., Pack et al. (1992) Biochem 31:1579-1584; Cumber et al. (1992) J Immunology 149B: 120-126); humanized antibody molecules (see, for example, Riechmann et al. (1988) Nature 332:323-327; Verhoeyan et al. (1988) Science 2:1534-1536; and U.K. Patent Publication No. GB 2,276,169, published 21 Sep. 1994); and, any functional fragments obtained from such molecules, wherein such fragments retain immunological binding properties of the parent antibody molecule. The invention further includes antibodies obtained through non-conventional processes, such as phage display.

[1391] Preferably, the Gram positive specific antibodies of the invention are monoclonal antibodies. Monoclonal antibodies of the invention include an antibody composition having a homogeneous antibody population. Monoclonal antibodies of the invention may be obtained from murine hybridomas, as well as human monoclonal antibodies obtained using human rather than murine

[symbol]

77.

[1392] The antibodies of the invention may be used in diagnostic applications, for example, to detect the presence or absence of Gram positive bacteria in a biological sample. The antibodies of the invention may also be used in the prophylactic or therapeutic treatment of Gram positive bacteria infection.

### Nucleic Acids

[1393] The invention provides nucleic acids encoding the Gram positive bacteria sequences and/or the hybrid fusion polypeptides of the invention. The invention also provides nucleic acid encoding the GBS antigens and/or the hybrid fusion polypeptides of the invention. Furthermore, the invention provides nucleic acid which can hybridise to these nucleic acids, preferably under “high stringency” conditions (e.g. 65° C. in a 0.1×SSC, 0.5% SDS solution).

[1394] Polypeptides of the invention can be prepared by various means (e.g. recombinant expression, purification from cell culture, chemical synthesis, etc.) and in various forms (e.g. native, fusions, non-glycosylated, lipidated, etc.). They are preferably prepared in substantially pure form (i.e. substantially free from other GAS or host cell proteins).

[1395] Nucleic acid according to the invention can be prepared in many ways (e.g. by chemical synthesis, from genomic or cDNA libraries, from the organism itself, etc.) and can take various forms (e.g. single stranded, double stranded, vectors, probes, etc.). They are preferably prepared in substantially pure form (i.e. substantially free from other GBS or host cell nucleic acids).

[1396] The term “nucleic acid” includes DNA and RNA, and also their analogues, such as those containing modified backbones (e.g. phosphorothioates, etc.), and also peptide nucleic acids (PNA), etc. The invention includes nucleic acid comprising sequences complementary to those described above (e.g. for antisense or probing purposes).

[1397] The invention also provides a process for producing a polypeptide of the invention, comprising the step of culturing a host cell transformed with nucleic acid of the invention under conditions which induce polypeptide expression.

[1398] The invention provides a process for producing a polypeptide of the invention, comprising the step of synthesising at least part of the polypeptide by chemical means.

[1399] The invention provides a process for producing nucleic acid of the invention, comprising the step of amplifying nucleic acid using a primer-based amplification method (e.g. PCR).

[1400] The invention provides a process for producing nucleic acid of the invention, comprising the step of synthesising at least part of the nucleic acid by chemical means.

### Purification and Recombinant Expression

[1401] The Gram positive bacteria AI proteins of the invention may be isolated from the native Gram positive bacteria, or they may be recombinantly produced, for instance in a heterologous host. For example, the GAS, GBS, and S. pneumoniae antigens of the invention may be isolated from

[symbol]

instance, in a heterologous host. Preferably, the GBS antigens are prepared using a heterologous host.

[1402] The heterologous host may be prokaryotic (e.g. a bacterium) or eukaryotic. It is preferably E. coli, but other suitable hosts include Bacillus subtilis, Vibrio cholerae, Salmonella typhi, Salmonella typhimurium, Neisseria lactamica, Neisseria cinerea, Mycobacteria (e.g. M. tuberculosis), S. gordonii, L. lactis, yeasts, etc.

[1403] Recombinant production of polypeptides is facilitated by adding a tag protein to the Gram positive bacteria AI sequence to be expressed as a fusion protein comprising the tag protein and the Gram positive bacteria antigen. For example, recombinant production of polypeptides is facilitated by adding a tag protein to the GBS antigen to be expressed as a fusion protein comprising the tag protein and the GBS antigen. Such tag proteins can facilitate purification, detection and stability of the expressed protein. Tag proteins suitable for use in the invention include a polyarginine tag (Arg-tag), polyhistidine tag (His-tag), FLAG-tag; Strep-tag, c-myc-tag, S-tag, calmodulin-binding peptide, cellulose-binding domain, SBP-tag, chitin-binding domain, glutathione S-transferase-tag (GST), maltose-binding protein, transcription termination anti-termination factor (NusA), E. coli thioredoxin (TrxA) and protein disulfide isomerase I (DsbA). Preferred tag proteins include His-tag and GST. A full discussion on the use of tag proteins can be found at Terpe et al., “Overview of tag protein fusions: from molecular and biochemical fundamentals to commercial systems”, Appl Microbiol Biotechnol (2003) 60:523-533.

[1404] After purification, the tag proteins may optionally be removed from the expressed fusion protein, i.e., by specifically tailored enzymatic treatments known in the art. Commonly used proteases include enterokinase, tobacco etch virus (TEV), thrombin, and factor Xₐ.

### GBS Polysaccharides

[1405] The compositions of the invention may be further improved by including GBS polysaccharides. Preferably, the GBS antigen and the saccharide each contribute to the immunological response in a recipient. The combination is particularly advantageous where the saccharide and polypeptide provide protection from different GBS serotypes.

[1406] The combined antigens may be present as a simple combination where separate saccharide and polypeptide antigens are administered together, or they may be present as a conjugated combination, where the saccharide and polypeptide antigens are covalently linked to each other.

[1407] Thus the invention provides an immunogenic composition comprising (i) one or more GBS AI proteins and (ii) one or more GBS saccharide antigens. The polypeptide and the polysaccharide may advantageously be covalently linked to each other to form a conjugate.

[1408] Between them, the combined polypeptide and saccharide antigens preferably cover (or provide protection from) two or more GBS serotypes (e.g. 2, 3, 4, 5, 6, 7, 8 or more serotypes). The serotypes of the polypeptide and saccharide antigens may or may not overlap. For example, the polypeptide might protect against serogroup II or V, while the saccharide protects against either serogroups Ia, Ib, or III. Preferred combinations protect against the following groups of serotypes:

[symbol]

serotypes Ia and V, (6) serotypes Ia and VI, (7) serotypes Ia and VII, (8) serotypes Ia and VIII, (9) serotypes Ib and II, (10) serotypes Ib and III, (11) serotypes Ib and IV, (12) serotypes Ib and V, (13) serotypes Ib and VI, (14) serotypes Ib and VII, (15) serotypes Ib and VIII, 16) serotypes II and III, (17) serotypes II and IV, (18) serotypes II and V, (19) serotypes I and VI, (20) serotypes II and VII, (21) serotypes II and VII, (22) serotypes III and IV, (23) serotypes III and V, (24) serotypes III and VI, (25) serotypes III and VII, (26) serotypes III and VIII, (27) serotypes IV and V, (28) serotypes IV and VI, (29) serotypes IV and VII, (30) serotypes IV and VIII, (31) serotypes V and VI, (32) serotypes V and VII, (33) serotypes V and VIII, (34) serotypes VI and VII, (35) serotypes VI and VIII, and (36) serotypes VII and VIII.

[1409] Still more preferably, the combinations protect against the following groups of serotypes: (1) serotypes Ia and II, (2) serotypes Ia and V, (3) serotypes Ib and II, (4) serotypes Ib and V, (5) serotypes III and II, and (6) serotypes III and V. Most preferably, the combinations protect against serotypes III and V.

[1410] Protection against serotypes II and V is preferably provided by polypeptide antigens. Protection against serotypes Ia, Ib and/or III may be polypeptide or saccharide antigens.

### Immunogenic Compositions and Medicaments

[1411] Compositions of the invention are preferably immunogenic compositions, and are more preferably vaccine compositions. The pH of the composition is preferably between 6 and 8, preferably about 7. The pH may be maintained by the use of a buffer. The composition may be sterile and/or pyrogen-free. The composition may be isotonic with respect to humans.

[1412] Vaccines according to the invention may either be prophylactic (i.e. to prevent infection) or therapeutic (i.e. to treat infection), but will typically be prophylactic. Accordingly, the invention includes a method for the therapeutic or prophylactic treatment of a Gram positive bacteria infection in an animal susceptible to such gram positive bacterial infection comprising administering to said animal a therapeutic or prophylactic amount of the immunogenic composition of the invention. For example, the invention includes a method for the therapeutic or prophylactic treatment of a Streptococcus agalactiae, S. pyogenes, or S. pneumoniae infection in an animal susceptible to streptococcal infection comprising administering to said animal a therapeutic or prophylactic amount of the immunogenic compositions of the invention.

[1413] The invention also provides a composition of the invention for use of the compositions described herein as a medicament. The medicament is preferably able to raise an immune response in a mammal (i.e. it is an immunogenic composition) and is more preferably a vaccine.

[1414] The invention also provides the use of the compositions of the invention in the manufacture of a medicament for raising an immune response in a mammal. The medicament is preferably a vaccine.

[1415] The invention also provides kits comprising one or more containers of compositions of the invention. Compositions can be in liquid form or can be lyophilized, as can individual antigens. Suitable containers for the compositions include, for example, bottles, vials, syringes, and test tubes.

[symbol]

a sterile access port (for example, the container may be an intravenous solution bag or a vial having a stopper pierceable by a hypodermic injection needle). The composition may comprise a first component comprising one or more Gram positive bacteria AI proteins. Preferably, the AI proteins are surface AI proteins. Preferably, the AI surface proteins are in an oligomeric or hyperoligomeric form. For example, the first component comprises a combination of GBS antigens or GAS antigens, or S. pneumoniae antigens. Preferably said combination includes GBS 80. Preferably GBS 80 is present in an oligomeric or hyperoligomeric form.

[1416] The kit can further comprise a second container comprising a pharmaceutically-acceptable buffer, such as phosphate-buffered saline, Ringer's solution, or dextrose solution. It can also contain other materials useful to the end-user, including other buffers, diluents, filters, needles, and syringes. The kit can also comprise a second or third container with another active agent, for example an antibiotic.

[1417] The kit can also comprise a package insert containing written instructions for methods of inducing immunity against S agalactiae and/or S. pyogenes and/or S pneumoniae or for treating S agalactiae and/or S. pyogenes and/or S pneumoniae infections. The package insert can be an unapproved draft package insert or can be a package insert approved by the Food and Drug Administration (FDA) or other regulatory body.

[1418] The invention also provides a delivery device pre-filled with the immunogenic compositions of the invention.

[1419] The invention also provides a method for raising an immune response in a mammal comprising the step of administering an effective amount of a composition of the invention. The immune response is preferably protective and preferably involves antibodies and/or cell-mediated immunity. This immune response will preferably induce long lasting (e.g. neutralising) antibodies and a cell mediated immunity that can quickly respond upon exposure to one or more GBS and/or GAS and/or S. pneumoniae antigens. The method may raise a booster response.

[1420] The invention provides a method of neutralizing GBS, GAS, or S. pneumoniae infection in a mammal comprising the step of administering to the mammal an effective amount of the immunogenic compositions of the invention, a vaccine of the invention, or antibodies which recognize an immunogenic composition of the invention.

[1421] The mammal is preferably a human. Where the vaccine is for prophylactic use, the human is preferably a female (either of child bearing age or a teenager). Alternatively, the human may be elderly (e.g., over the age of 50, 55, 60, 65, 70 or 75) and may have an underlying disease such as diabetes or cancer. Where the vaccine is for therapeutic use, the human is preferably a pregnant female or an elderly adult.

[1422] These uses and methods are preferably for the prevention and/or treatment of a disease caused by Streptococcus agalactiae, or S. pyogenes, or S. pneumoniae. The compositions may also be

[symbol]

Gram positive bacteria.

[1423] One way of checking efficacy of therapeutic treatment involves monitoring Gram positive bacterial infection after administration of the composition of the invention. One way of checking efficacy of prophylactic treatment involves monitoring immune responses against the Gram positive bacterial antigens in the compositions of the invention after administration of the composition.

[1424] One way of checking efficacy of therapeutic treatment involves monitoring GBS infection after administration of the composition of the invention. One way of checking efficacy of prophylactic treatment involves monitoring immune responses against the GBS antigens in the compositions of the invention after administration of the composition.

[1425] A way of assessing the immunogenicity of the component proteins of the immunogenic compositions of the present invention is to express the proteins recombinantly and to screen patient sera or mucosal secretions by immunoblot. A positive reaction between the protein and the patient serum indicates that the patient has previously mounted an immune response to the protein in question—that is, the protein is an immunogen. This method may also be used to identify immunodominant proteins and/or epitopes.

[1426] Another way of checking efficacy of therapeutic treatment involves monitoring GBS or GAS or S pneumoniae infection after administration of the compositions of the invention. One way of checking efficacy of prophylactic treatment involves monitoring immune responses both systemically (such as monitoring the level of IgG1 and IgG2a production) and mucosally (such as monitoring the level of IgA production) against the GBS and/or GAS and/or S pneumoniae antigens in the compositions of the invention after administration of the composition. Typically, GBS and/or GAS and/or S pneumoniae serum specific antibody responses are determined post-immunization but pre-challenge whereas mucosal GBS and/or GAS and/or S pneumoniae specific antibody body responses are determined post-immunization and post-challenge.

[1427] The vaccine compositions of the present invention can be evaluated in in vitro and in vivo animal models prior to host, e.g., human, administration.

[1428] The efficacy of immunogenic compositions of the invention can also be determined in vivo by challenging animal models of GBS and/or GAS and/or S pneumoniae infections e.g., guinea pigs or mice, with the immunogenic compositions. The immunogenic compositions may or may not be derived from the same serotypes as the challenge serotypes. Preferably the immunogenic compositions are derivable from the same serotypes as the challenge serotypes. More preferably, the immunogenic composition and/or the challenge serotypes are derivable from the group of GBS and/or GAS and/or S pneumoniae serotypes.

[1429] In vivo efficacy models include but are not limited to: (i) A murine infection model using human GBS and/or GAS and/or S pneumoniae serotypes; (ii) a murine disease model which is a murine model using a mouse-adapted GBS and/or GAS and/or S pneumoniae strain, such as those

[symbol]

GBS or GAS or S pneumoniae isolates.

[1430] The immune response may be one or both of a TH1 immune response and a TH2 response.

[1431] The immune response may be an improved or an enhanced or an altered immune response.

[1432] The immune response may be one or both of a systemic and a mucosal immune response.

[1433] Preferably the immune response is an enhanced system and/or mucosal response.

[1434] An enhanced systemic and/or mucosal immunity is reflected in an enhanced TH1 and/or TH2 immune response. Preferably, the enhanced immune response includes an increase in the production of IgG1 and/or IgG2a and/or IgA

[1435] Preferably the mucosal immune response is a TH2 immune response. Preferably, the mucosal immune response includes an increase in the production of IgA.

[1436] Activated TH2 cells enhance antibody production and are therefore of value in responding to extracellular infections. Activated TH2 cells may secrete one or more of IL-4, IL-5, IL-6, and IL-10. A TH2 immune response may result in the production of IgG1, IgE, IgA and memory B cells for future protection.

[1437] A TH2 immune response may include one or more of an increase in one or more of the cytokines associated with a TH2 immune response (such as IL-4, IL-5, IL-6 and IL-10), or an increase in the production of IgG1, IgE, IgA and memory B cells. Preferably, the enhanced TH2 immune response will include an increase in IgG1 production.

[1438] A TH1 immune response may include one or more of an increase in CTLs, an increase in one or more of the cytokines associated with a TH1 immune response (such as IL-2, IFNγ, and TNFβ), an increase in activated macrophages, an increase in NK activity, or an increase in the production of IgG2a. Preferably, the enhanced TH1 immune response will include an increase in IgG2a production.

[1439] Immunogenic compositions of the invention, in particular, immunogenic composition comprising one or more GAS antigens of the present invention may be used either alone or in combination with other GAS antigens optionally with an immunoregulatory agent capable of eliciting a Th1 and/or Th2 response.

[1440] Compositions of the invention will generally be administered directly to a patient. Certain routes may be favored for certain compositions, as resulting in the generation of a more effective immune response, preferably a CMI response, or as being less likely to induce side effects, or as being easier for administration. Direct delivery may be accomplished by parenteral injection (e.g. subcutaneously, intraperitoneally, intradermally, intravenously, intramuscularly, or to the interstitial space of a tissue), or by rectal, oral (e.g. tablet, spray), vaginal, topical transdermal (e.g. see WO 99/27961) or transcutaneous (e.g. see WO 02/074244 and WO 02/064162), intranasal (e.g. see WO03/028760), ocular, aural, pulmonary or other mucosal administration.

[1441] The invention may be used to elicit systemic and/or mucosal immunity.

[symbol]

more GBS or GAS or S pneumoniae antigen(s) which elicits a neutralising antibody response and one or more GBS or GAS or S pneumoniae antigen(s) which elicit a cell mediated immune response. In this way, the neutralising antibody response prevents or inhibits an initial GBS or GAS or S pneumoniae infection while the cell-mediated immune response capable of eliciting an enhanced Th1 cellular response prevents further spreading of the GBS or GAS or S pneumoniae infection. Preferably, the immunogenic composition comprises one or more GBS or GAS or S pneumoniae surface antigens and one or more GBS or GAS or S pneumoniae cytoplasmic antigens. Preferably the immunogenic composition comprises one or more GBS or GAS or S pneumoniae surface antigens or the like and one or other antigens, such as a cytoplasmic antigen capable of eliciting a Th1 cellular response.

[1442] Dosage treatment can be a single dose schedule or a multiple dose schedule. Multiple doses may be used in a primary immunisation schedule and/or in a booster immunisation schedule. In a multiple dose schedule the various doses may be given by the same or different routes e.g. a parenteral prime and mucosal boost, a mucosal prime and parenteral boost, etc.

[1443] The compositions of the invention may be prepared in various forms. For example, the compositions may be prepared as injectables, either as liquid solutions or suspensions. Solid forms suitable for solution in, or suspension in, liquid vehicles prior to injection can also be prepared (e.g. a lyophilised composition). The composition may be prepared for topical administration e.g. as an ointment, cream or powder. The composition may be prepared for oral administration e.g. as a tablet or capsule, as a spray, or as a syrup (optionally flavoured). The composition may be prepared for pulmonary administration e.g. as an inhaler, using a fine powder or a spray. The composition may be prepared as a suppository or pessary. The composition may be prepared for nasal, aural or ocular administration e.g. as drops. The composition may be in kit form, designed such that a combined composition is reconstituted just prior to administration to a patient. Such kits may comprise one or more antigens in liquid form and one or more lyophilised antigens.

[1444] Immunogenic compositions used as vaccines comprise an immunologically effective amount of antigen(s), as well as any other components, such as antibiotics, as needed. By ‘immunologically effective amount’, it is meant that the administration of that amount to an individual, either in a single dose or as part of a series, is effective for treatment or prevention, or increases a measurable immune response or prevents or reduces a clinical symptom. This amount varies depending upon the health and physical condition of the individual to be treated, age, the taxonomic group of individual to be treated (e.g. non-human primate, primate, etc.), the capacity of the individual's immune system to synthesise antibodies, the degree of protection desired, the formulation of the vaccine, the treating doctor's assessment of the medical situation, and other relevant factors. It is expected that the amount will fall in a relatively broad range that can be determined through routine trials.

[symbol]

[1445] The composition of the invention will typically, in addition to the components mentioned above, comprise one or more ‘pharmaceutically acceptable carriers’, which include any carrier that does not itself induce the production of antibodies harmful to the individual receiving the composition. Suitable carriers are typically large, slowly metabolised macromolecules such as proteins, polysaccharides, polylactic acids, polyglycolic acids, polymeric amino acids, amino acid copolymers, and lipid aggregates (such as oil droplets or liposomes). Such carriers are well known to those of ordinary skill in the art. The vaccines may also contain diluents, such as water, saline, glycerol, etc. Additionally, auxiliary substances, such as wetting or emulsifying agents, pH buffering substances, and the like, may be present. A thorough discussion of pharmaceutically acceptable excipients is available in Gennaro (2000) Remington: The Science and Practice of Pharmacy. 20th ed., ISBN: 0683306472.

### Adjuvants

[1446] Vaccines of the invention may be administered in conjunction with other immunoregulatory agents. In particular, compositions will usually include an adjuvant. Adjuvants for use with the invention include, but are not limited to, one or more of the following set forth below:

[1447] A. Mineral Containing Compositions

[1448] Mineral containing compositions suitable for use as adjuvants in the invention include mineral salts, such as aluminum salts and calcium salts. The invention includes mineral salts such as hydroxides (e.g. oxyhydroxides), phosphates (e.g. hydroxyphosphates, orthophosphates), sulfates, etc. (e.g. see chapters 8 & 9 of Vaccine Design . . . (1995) eds. Powell & Newman. ISBN: 030644867X. Plenum.), or mixtures of different mineral compounds (e.g. a mixture of a phosphate and a hydroxide adjuvant, optionally with an excess of the phosphate), with the compounds taking any suitable form (e.g. gel, crystalline, amorphous, etc.), and with adsorption to the salt(s) being preferred. The mineral containing compositions may also be formulated as a particle of metal salt (WO 00/23105).

[1449] Aluminum salts may be included in vaccines of the invention such that the dose of Al³⁺ is between 0.2 and 1.0 mg per dose.

[1450] B. Oil-Emulsions

[1451] Oil-emulsion compositions suitable for use as adjuvants in the invention include squalene-water emulsions, such as MF59 (5% Squalene, 0.5% Tween 80, and 0.5% Span 85, formulated into submicron particles using a microfluidizer). See WO90/14837. See also, Podda, “The adjuvanted influenza vaccines with novel adjuvants: experience with the MP59-adjuvanted vaccine”, Vaccine (2001) 19: 2673-2680; Frey et al., “Comparison of the safety, tolerability, and immunogenicity of a MF59-adjuvanted influenza vaccine and a non-adjuvanted influenza vaccine in non-elderly adults”, Vaccine (2003) 21:423-44237. MF59 is used as the adjuvant in the FLUAD™ influenza virus trivalent subunit vaccine.

[symbol]

emulsions. Preferred submicron oil-in-water emulsions for use herein are squalene/water emulsions optionally containing varying amounts of MTP-PE, such as a submicron oil-in-water emulsion containing 4-5% w/v squalene, 0.25-1.0% w/v Tween 80™ (polyoxyethylenesorbitan monooleate), and/or 0.25-1.0% Span 85™ (sorbitan trioleate), and, optionally, N-acetylmuramyl-L-alanyl-D-isoglutaminyl-L-alanine-2-(1′-2′-dipalmitoyl-sn-glycero-3-hydroxyphosphosphoryloxy)-ethylamine (MTP-PE), for example, the submicron oil-in-water emulsion known as “MF59” (International Publication No. WO 90/14837, U.S. Pat. Nos. 6,299,884 and 6,451,325, incorporated herein by reference in their entireties; and Ott et al., “MF59—Design and Evaluation of a Safe and Potent Adjuvant for Human Vaccines” in Vaccine Design: The Subunit and Adjuvant Approach (Powell, M. F. and Newman, M. J. eds.) Plenum Press, New York, 1995, pp. 277-296). MF59 contains 4-5% w/v Squalene (e.g. 4.3%), 0.25-0.5% w/v Tween 80™, and 0.5% w/v Span 85™ and optionally contains various amounts of MTP-PE, formulated into submicron particles using a microfluidizer such as Model 110Y microfluidizer (Microfluidics, Newton, Mass.). For example, MTP-PE may be present in an amount of about 0-500 μg/dose, more preferably 0-250 μg/dose and most preferably, 0-100 μg/dose. As used herein, the term “MF59-0” refers to the above submicron oil-in-water emulsion lacking MTP-PE, while the term MF59-MTP denotes a formulation that contains MTP-PE. For instance, “MF59-100” contains 100 μg MTP-PE per dose, and so on. MF69, another submicron oil-in-water emulsion for use herein, contains 4.3% w/v squalene, 0.25% w/v Tween 80™, and 0.75% w/v Span 85™ and optionally MTP-PE. Yet another submicron oil-in-water emulsion is MF75, also known as SAF, containing 10% squalene, 0.4% Tween 80w, 5% pluronic-blocked polymer L121, and thr-MDP, also microfluidized into a submicron emulsion. M75-MTP denotes an MF75 formulation that includes MTP, such as from 100-400 μg MTP-PE per dose.

[1452] Submicron oil-in-water emulsions, methods of making the same and immunostimulating agents, such as muramyl peptides, for use in the compositions, are described in detail in International Publication No. WO 90/14837 and U.S. Pat. Nos. 6,299,884 and 6,451,325, incorporated herein by reference in their entireties.

[1453] Complete Freund's adjuvant (CFA) and incomplete Freund's adjuvant (IFA) may also be used as adjuvants in the invention.

[1454] C. Saponin Formulation

[1455] Saponin formulations, may also be used as adjuvants in the invention. Saponins are a heterologous group of sterol glycosides and triterpenoid glycosides that are found in the bark, leaves, stems, roots and even flowers of a wide range of plant species. Saponin from the bark of the Quillaia saponaria Molina tree have been widely studied as adjuvants. Saponin can also be commercially obtained from Smilax ornata (sarsaprilla), Gypsophilla paniculata (brides veil), and Saponaria officianalis (soap root). Saponin adjuvant formulations include purified formulations, such as QS21, as well as lipid formulations, such as ISCOMs.

[symbol]

Chromatography (HP-LC) and Reversed Phase High Performance Liquid Chromatography (RP-HPLC). Specific purified fractions using these techniques have been identified, including QS7, QS17, QS18, QS21, QH-A, QH-B and QH-C. Preferably, the saponin is QS21. A method of production of QS21 is disclosed in U.S. Pat. No. 5,057,540. Saponin formulations may also comprise a sterol, such as cholesterol (see WO96/33739).

[1456] Combinations of saponins and cholesterols can be used to form unique particles called Immunostimulating Complexes (ISCOMs). ISCOMs typically also include a phospholipid such as phosphatidylethanolamine or phosphatidylcholine. Any known saponin can be used in ISCOMs. Preferably, the ISCOM includes one or more of Quil A, QHA and QHC. ISCOMs are further described in EP0109942, WO 96/11711 and WO 96/33739. Optionally, the ISCOMS may be devoid of additional detergent. See WO 00/07621.

[1457] A review of the development of saponin based adjuvants can be found at Barr, et al., “ISCOMs and other saponin based adjuvants”, Advanced Drug Delivery Reviews (1998) 32:247-271. See also Sjolander, et al., “Uptake and adjuvant activity of orally delivered saponin and ISCOM vaccines”, Advanced Drug Delivery Reviews (1998) 32:321-338.

[1458] D. Virosomes and Virus Like Particles (VLPs)

[1459] Virosomes and Virus Like Particles (VLPs) can also be used as adjuvants in the invention. These structures generally contain one or more proteins from a virus optionally combined or formulated with a phospholipid. They are generally non-pathogenic, non-replicating and generally do not contain any of the native viral genome. The viral proteins may be recombinantly produced or isolated from whole viruses. These viral proteins suitable for use in virosomes or VLPs include proteins derived from influenza virus (such as HA or NA), Hepatitis B virus (such as core or capsid proteins), Hepatitis E virus, measles virus, Sindbis virus, Rotavirus, Foot-and-Mouth Disease virus, Retrovirus, Norwalk virus, human Papilloma virus, HIV, RNA-phages, Qβ-phage (such as coat proteins), GA-phage, fr-phage, AP205 phage, and Ty (such as retrotransposon Ty protein p1). VLPs are discussed further in WO 03/024480, WO 03/024481, and Niikura et al., “Chimeric Recombinant Hepatitis E Virus-Like Particles as an Oral Vaccine Vehicle Presenting Foreign Epitopes”, Virology (2002) 293:273-280; Lenz et al., “Papillomarivurs-Like Particles Induce Acute Activation of Dendritic Cells”, Journal of Immunology (2001) 5246-5355; Pinto, et al., “Cellular Immune Responses to Human Papillomavirus (HPV)-16 L1 Healthy Volunteers Immunized with Recombinant HPV-16 L1 Virus-Like Particles”, Journal of infectious Diseases (2003) 188:327-338; and Gerber et al., “Human Papillomavrisu Virus-Like Particles Are Efficient Oral Immunogens when Coadministered with Escherichia coli Heat-Labile Entertoxin Mutant R192G or CpG”, Journal of Virology (2001) 75(10):4752-4760. Virosomes are discussed further in, for example, Gluck et al., “New Technology Platforms in the Development of Vaccines for the Future”, Vaccine (2002) 20:B10-B16. Immunopotentiating reconstituted influenza virosomes (IRIV) are used as the subunit antigen

[symbol]

Vaccine 20 Suppl 5:B17-23} and the INFLUVAC PLUS™ product.

[1460] E. Bacterial or Microbial Derivatives

[1461] Adjuvants suitable for use in the invention include bacterial or microbial derivatives such as:

[1462] (1) Non-Toxic Derivatives of Enterobacterial Lipopolysaccharide (LPS)

[1463] Such derivatives include Monophosphoryl lipid A (MPL) and 3-O-deacylated MPL (3dMPL). 3dMPL is a mixture of 3 De-O-acylated monophosphoryl lipid A with 4, 5 or 6 acylated chains. A preferred “small particle” form of 3 De-O-acylated monophosphoryl lipid A is disclosed in EP 0 689 454. Such “small particles” of 3dMPL are small enough to be sterile filtered through a 0.22 micron membrane (see EP 0 689 454). Other non-toxic LPS derivatives include monophosphoryl lipid A mimics, such as aminoalkyl glucosaminide phosphate derivatives e.g. RC-529. See Johnson et al. (1999) Bioorg Med Chem Lett 9:2273-2278.

[1464] (2) Lipid A Derivatives

[1465] Lipid A derivatives include derivatives of lipid A from Escherichia coli such as OM-174. OM-174 is described for example in Meraldi et al., “OM-174, a New Adjuvant with a Potential for Human Use, Induces a Protective Response with Administered with the Synthetic C-Terminal Fragment 242-310 from the circumsporozoite protein of Plasmodium berghei”, Vaccine (2003) 21:2485-2491; and Pajak, et al., “The Adjuvant OM-174 induces both the migration and maturation of murine dendritic cells in vivo”, Vaccine (2003) 21:836-842.

[1466] (3) Immunostimulatory Oligonucleotides

[1467] Immunostimulatory oligonucleotides suitable for use as adjuvants in the invention include nucleotide sequences containing a CpG motif (a sequence containing an unmethylated cytosine followed by guanosine and linked by a phosphate bond). Bacterial double stranded RNA or oligonucleotides containing palindromic or poly(dG) sequences have also been shown to be immunostimulatory.

[1468] The CpG's can include nucleotide modifications/analogs such as phosphorothioate modifications and can be double-stranded or single-stranded. Optionally, the guanosine may be replaced with an analog such as 2′-deoxy-7-deazaguanosine. See Kandimalla, et al., “Divergent synthetic nucleotide motif recognition pattern: design and development of potent immunomodulatory oligodeoxyribonucleotide agents with distinct cytokine induction profiles”, Nucleic Acids Research (2003) 31(9): 2393-2400; WO02/26757 and WO99/62923 for examples of possible analog substitutions. The adjuvant effect of CpG oligonucleotides is further discussed in Krieg, “CpG motifs: the active ingredient in bacterial extracts?”, Nature Medicine (2003) 9(7): 831-835; McCluskie, et al., “Parenteral and mucosal prime-boost immunization strategies in mice with hepatitis B surface antigen and CpG DNA”, FEMS Immunology and Medical Microbiology (2002) 32:179-185; WO98/40100; U.S. Pat. No. 6,207,646; U.S. Pat. No. 6,239,116 and U.S. Pat. No. 6,429,199.

[1469] The CpG sequence may be directed to TLR9, such as the motif GTCGTT or TTCGTT. See Kandimalla, et al., “Toll-like receptor 9: modulation of recognition and cytokine induction by novel

[symbol]

sequence may be specific for inducing a Th1 immune response, such as a CpG-A ODN, or it may be more specific for inducing a B cell response, such a CpG-B ODN. CpG-A and CpG-B ODNs are discussed in Blackwell, et al., “CpG-A-Induced Monocyte IFN-gamma-Inducible Protein-10 Production is Regulated by Plasmacytoid Dendritic Cell Derived IFN-alpha”, J. Immunol. (2003) 170(8):4061-4068; Krieg, “From A to Z on CpG”, TRENDS in Immunology (2002) 23(2): 64-65 and WO01/95935. Preferably, the CpG is a CpG-A ODN.

[1470] Preferably, the CpG oligonucleotide is constructed so that the 5′ end is accessible for receptor recognition. Optionally, two CpG oligonucleotide sequences may be attached at their 3′ ends to form “immunomers”. See, for example, Kandimalla, et al., “Secondary structures in CpG oligonucleotides affect immunostimulatory activity”, BBRC (2003) 306:948-953; Kandimalla, et al., “Toll-like receptor 9: modulation of recognition and cytokine induction by novel synthetic GpG DNAs”, Biochemical Society Transactions (2003) 31(part 3):664-658; Bhagat et al., “CpG penta- and hexadeoxyribonucleotides as potent immunomodulatory agents” BBRC (2003) 300:853-861 and WO 03/035836.

[1471] (4) ADP-Ribosylating Toxins and Detoxified Derivatives Thereof.

[1472] Bacterial ADP-ribosylating toxins and detoxified derivatives thereof may be used as adjuvants in the invention. Preferably, the protein is derived from E. coli (i.e., E. coli heat labile enterotoxin “LT), cholera (“CT”), or pertussis (“PT”). The use of detoxified ADP-ribosylating toxins as mucosal adjuvants is described in WO95/17211 and as parenteral adjuvants in WO98/42375. Preferably, the adjuvant is a detoxified LT mutant such as LT-K63, LT-R72, and LTR192G. The use of ADP-ribosylating toxins and detoxified derivatives thereof, particularly LT-K63 and LT-R72, as adjuvants can be found in the following references, each of which is specifically incorporated by reference herein in their entirety: Beignon, et al., “The LTR72 Mutant of Heat-Labile Enterotoxin of Escherichia coli Enhances the Ability of Peptide Antigens to Elicit CD4+ T Cells and Secrete Gamma Interferon after Coapplication onto Bare Skin”, Infection and Immunity (2002) 70(6):3012-3019; Pizza, et al., “Mucosal vaccines: non toxic derivatives of LT and CT as mucosal adjuvants”, Vaccine (2001) 19:2534-2541; Pizza, et al., “LTK63 and LTR72, two mucosal adjuvants ready for clinical trials” Int. J. Med. Microbiol (2000) 290(4-5):455-461; Scharton-Kersten et al., “Transcutaneous Immunization with Bacterial ADP-Ribosylating Exotoxins, Subunits and Unrelated Adjuvants”, Infection and Immunity (2000) 68(9):5306-5313; Ryan et al., “Mutants of Escherichia coli Heat-Labile Toxin Act as Effective Mucosal Adjuvants for Nasal Delivery of an Acellular Pertussis Vaccine: Differential Effects of the Nontoxic AB Complex and Enzyme Activity on Th1 and Th2 Cells” Infection and Immunity (1999) 67(12):6270-6280; Partidos et al., “Heat-labile enterotoxin of Escherichia coli and its site-directed mutant LTK63 enhance the proliferative and cytotoxic T-cell responses to intranasally co-immunized synthetic peptides”, Immunol. Lett. (1999) 67(3):209-216; Peppoloni et al., “Mutants of the Escherichia coli heat-labile enterotoxin as safe and strong adjuvants for intranasal delivery of vaccines”, Vaccines (2003) 2(2):285-293; and Pine et al., (2002) “Intranasal

[symbol]

Escherichia coli (LTK63)” J. Control Release (2002) 85(1-3):263-270. Numerical reference for amino acid substitutions is preferably based on the alignments of the A and B subunits of ADP-ribosylating toxins set forth in Domenighini et al., Mol. Microbiol (1995) 15(6):1165-1167, specifically incorporated herein by reference in its entirety.

[1473] F. Bioadhesives and Mucoadhesives

[1474] Bioadhesives and mucoadhesives may also be used as adjuvants in the invention. Suitable bioadhesives include esterified hyaluronic acid microspheres (Singh et al. (2001) J. Cont. Rele. 70:267-276) or mucoadhesives such as cross-linked derivatives of poly(acrylic acid), polyvinyl alcohol, polyvinyl pyrollidone, polysaccharides and carboxymethylcellulose. Chitosan and derivatives thereof may also be used as adjuvants in the invention. E.g. WO99/27960.

[1475] G. Microparticles

[1476] Microparticles may also be used as adjuvants in the invention. Microparticles (i.e. a particle of ˜100 nm to ˜150 μm in diameter, more preferably ˜200 nm to ˜30 μm in diameter, and most preferably ˜500 nm to ˜10 μm in diameter) formed from materials that are biodegradable and non-toxic (e.g. a poly(α-hydroxy acid), a polyhydroxybutyric acid, a polyorthoester, a polyanhydride, a polycaprolactone, etc.), with poly(lactide-eo-glycolide) are preferred, optionally treated to have a negatively-charged surface (e.g. with SDS) or a positively-charged surface (e.g. with a cationic detergent, such as CTAB).

[1477] H. Liposomes

[1478] Examples of liposome formulations suitable for use as adjuvants are described in U.S. Pat. No. 6,090,406, U.S. Pat. No. 5,916,588, and EP 0 626 169.

[1479] I. Polyoxyethylene Ether and Polyoxyethylene Ester Formulations

[1480] Adjuvants suitable for use in the invention include polyoxyethylene ethers and polyoxyethylene esters. WO99/52549. Such formulations further include polyoxyethylene sorbitan ester surfactants in combination with an octoxynol (WO01/21207) as well as polyoxyethylene alkyl ethers or ester surfactants in combination with at least one additional non-ionic surfactant such as an octoxynol (WO 01/21152).

[1481] Preferred polyoxyethylene ethers are selected from the following group: polyoxyethylene-9-lauryl ether (laureth 9), polyoxyethylene-9-steoryl ether, polyoxytheylene-8-steoryl ether, polyoxyethylene-lauryl ether, polyoxyethylene-35-lauryl ether, and polyoxyethylene-23-lauryl ether.

[1482] J. Polyphosphazene (PCPP)

[1483] PCPP formulations are described, for example, in Andrianov et al., “Preparation of hydrogel microspheres by coacervation of aqueous polyphophazene solutions”, Biomaterials (1998) 19(1-3): 109-115 and Payne et al., “Protein Release from Polyphosphazene Matrices”, Adv. Drug. Delivery Review (1998) 31(3):185-196.

[symbol]

[1484] Examples of muramyl peptides suitable for use as adjuvants in the invention include N-acetyl-muramyl-L-threonyl-D-isoglutamine (thr-MDP), N-acetyl-normuramyl-1-alanyl-d-isoglutamine (nor-MDP), and N-acetylmuramyl-1-alanyl-d-isoglutaminyl-1-alanine-2-(1′-2′-dipalmtoyl-sn-glycero-3-hydroxyphosphoryloxy)-ethylamine MTP-PE).

[1485] L. Imidazoquinolone Compounds.

[1486] Examples of imidazoquinolone compounds suitable for use adjuvants in the invention include Imiquamod and its homologues, described further in Stanley, “Imiquimod and the imidazoquinolones: mechanism of action and therapeutic potential” Clin Exp Dermatol (2002) 21(7):571-577 and Jones, “Resiquimod 3M”, Curr Opin Investig Drugs (2003) 4(2):214-218.

[1487] The invention may also comprise combinations of aspects of one or more of the adjuvants identified above. For example, the following adjuvant compositions may be used in the invention:

(1) a saponin and an oil-in-water emulsion (WO 99/11241);
(2) a saponin (e.g., QS21)+a non-toxic LPS derivative (e.g. 3dMPL) (see WO 94/00153);
(3) a saponin (e.g., QS21)+a non-toxic LPS derivative (e.g. 3dMPL)+a cholesterol;
(4) a saponin (e.g. QS21)+3dMPL+IL-12 (optionally +a sterol) (WO 98/57659);
(5) combinations of 3dMPL with, for example, QS21 and/or oil-in-water emulsions (See European patent applications 0835318, 0735898 and 0761231);
(6) SAF, containing 10% Squalane, 0.4% Tween 80, 5% pluronic-block polymer L121, and thr-MDP, either microfluidized into a submicron emulsion or vortexed to generate a larger particle size emulsion.
(7) Ribi™ adjuvant system (RAS), (Ribi Immunochem) containing 2% Squalene, 0.2% Tween 80, and one or more bacterial cell wall components from the group consisting of monophosphorylipid A (MPL), trehalose dimycolate (TDM), and cell wall skeleton (CWS), preferably MPL+CWS (Detox™);
(8) one or more mineral salts (such as an aluminum salt)+a non-toxic derivative of LPS (such as 3dPML).
(9) one or more mineral salts (such as an aluminum salt)+an immunostimulatory oligonucleotide (such as a nucleotide sequence including a CpG motif). Combination No. (9) is a preferred adjuvant combination.

[1488] M. Human Immunomodulators

[1489] Human immunomodulators suitable for use as adjuvants in the invention include cytokines, such as interleukins (e.g. IL-1, IL-2, IL-4, IL-5, IL-6, IL-7, IL-12, etc.), interferons (e.g. interferon-γ), macrophage colony stimulating factor, and tumor necrosis factor.

[1490] Aluminum salts and MF59 are preferred adjuvants for use with injectable influenza vaccines. Bacterial toxins and bioadhesives are preferred adjuvants for use with mucosally-delivered vaccines, such as nasal vaccines.

[symbol]

with an antibiotic treatment regime. In one embodiment, the antibiotic is administered prior to administration of the antigen of the invention or the composition comprising the one or more of the antigens of the invention.

[1491] In another embodiment, the antibiotic is administered subsequent to the administration of the one or more antigens of the invention or the composition comprising the one or more antigens of the invention. Examples of antibiotics suitable for use in the treatment of the Streptococcal infections of the invention include but are not limited to penicillin or a derivative thereof or clindamycin or the like.

### Further Antigens

[1492] The compositions of the invention may further comprise one or more additional Gram positive bacterial antigens which are not associated with an AI. Preferably, the Gram positive bacterial antigens that are not associated with an AI can provide protection across more than one serotype or strain isolate. For example, a first non-AI antigen, in which the first non-AI antigen is at least 90% (i.e., at least 90, 91, 92, 93, 94, 95, 96, 97, 98, 99, or 100%) homologous to the amino acid sequence of a second non-AI antigen, wherein the first and the second non-AI antigen are derived from the genomes of different serotypes of a Gram positive bacteria, may be further included in the compositions. The first non-AI antigen may also be homologous to the amino acid sequence of a third non-AI antigen, such that the first non-AI antigen, the second non-AI antigen, and the third non-AI antigen are derived from the genomes of different serotypes of a Gram positive bacteria. The first non-AI antigen may also be homologous to the amino acid sequence of a fourth non-AI antigen, such that the first non-AI antigen, the second non-AI antigen, the third non-AI antigen, and the fourth non-AI antigen are derived from the genomes of different serotypes of a Gram positive bacteria.

[1493] The first non-AI antigen may be GBS 322. The amino acid sequence of GBS 322 across GBS strains from serotypes Ia, Ib, H, III, V, and VIII is greater than 90%. Alternatively, the first non-AI antigen may be GBS 276. The amino acid sequence of GBS 276 across GBS strain from serotypes Ia, Ib, II, III, V, and VIII is greater than 90%. Table 13 provides the percent amino acid sequence identity of GBS 322 and GBS 276 across different GBS strains and serotypes.

TABLE 13
Conservation of GBS 322 and GBS 276 amino acid sequences

| | | GBS 322 | | GBS 276 | |
|---|---|---|---|---|---|
| Serotype | Strains | cGH | % AA identity | cGH | % AA identity |
| Ia | 090 | + | 98.60 | + | 97.90 |
| | A909 | + | 98.30 | + | 97.90 |
| | 515 | + | 98.80 | + | 97.50 |
| | DK1 | + | | + | |
| | DK8 | + | | + | |
| | Davis | + | | + | |
| Ib | 7357b | + | | + | |
| | H36B | + | 98.30 | + | 97.80 |
| II | 18RS21 | + | 100.00 | + | 99.90 |
| | DK21 | + | | + | |
| III | NEM316 | + | 100.00 | + | 97.00 |
| | COH31 | + | | + | |
| | D136 | + | | + | |
| | M732 | + | 98.00 | + | 100.00 |
| | COH1 | + | 98.30 | + | 100.00 |
| | M781 | + | 98.30 | + | 99.60 |
| No type | CJB110 | + | 98.60 | + | 97.90 |
| | 1169NT | + | 97.40 | + | 97.90 |
| V | CJB111 | + | 100.00 | + | |
| | 2603 | + | 100.00 | + | 100.00 |
| VIII | JM130013 | + | 100.00 | + | 97.90 |
| | SMU014 | + | | + | |

| | | | | |
|---|---|---|---|---|
| total | 22/22 | 98.28 +/− 0.4 | 22/22 | 98.44 +/− 1.094 |

[1494] As an example, inclusion of a non-AI protein, GBS 322, in combination with AI antigens GBS 67, GBS 80, and GBS 104 provided protection to newborn mice in an active maternal immunization assay.

TABLE 14
Active maternal immunization assay for a combination of fragments from
GBS 322, GBS 80, GBS 104, and GBS 67

| | | | | | MIX = 322 + 80 + | | | |
|---|---|---|---|---|---|---|---|---|
| | | FACS (Δ Mean) | | | 104 + 67 | | PBS | |
| GBS strains | Type | GBS 80 | GBS 67 | GBS 322 | alive/treated | % protection | alive/treated | % protection |
| 515 | Ia | 0 | 409 | 227 | 39/40 | 97 | 6/40 | 15 |
| 7357b- | Ib | 91 | 316 | 102 | 19/30 | 63 | 1/30 | 3 |
| DK21 | II | 0 | 331 | 416 | 25/34 | 73 | 17/48 | 35 |
| 5401 | II | 170 | 618 | 135 | 35/40 | 87 | 3/37 | 8 |
| 3050 | II | 43 | 460 | 188 | 48/48 | 100 | 1/30 | 3 |
| COH1 | III | 305 | 0 | 130 | 36/36 | 100 | 7/40 | 17 |
| M781 | III | 65 | 0 | 224 | 30/40 | 75 | 4/39 | 10 |
| 2603 | V | 125 | 105 | 313 | 27/33 | 82 | 10/35 | 28 |
| CJB111 | V | 370 | 481 | 63 | 25/28 | 89 | 4/46 | 9 |
| JM9130013 | VIII | 597 | 83 | 143 | 37/39 | 95 | 5/40 | 12 |
| JMU071 | VIII | 556 | 79 | 170 | 44/50 | 88 | 18/50 | 36 |
| NT1169 | NT | 0 | 443 | 213 | 12/32 | 37 | 11/35 | 31 |

[1495] In fact, the non-AI GBS 322 antigen may itself provide protection to newborn mice in an active maternal immunization assay.

TABLE 16
Active maternal immunization assay for each of GBS 80 and GBS
322 antigens

| | | GBS 80 | | | GBS 322 | | |
|---|---|---|---|---|---|---|---|
| | | | Protection | | | Protection | |
| | | FACS | (% survival) | | FACS | (% survival) | |
| GBS strains | Type | Δ Mean | antigen | ctrl- | Δ Mean | antigen | ctrl- |
| CJB111 | V | 370 | 72% | 40% | 63 | 57% | 40% |
| COH1 | III | 305 | 76% | 10% | 130 | 3% | 10% |
| 2603 | V | 82 | 22% | 34% | 313 | 83% | 34% |
| 7357b- | Ib | 91 | 36% | 34% | 102 | 43% | 34% |
| 18RS21 | II | 0 | 15% | 24% | 268 | 84% | 24% |
| DK21 | II | 0 | 10% | 21% | 416 | 67% | 25% |
| A909 | Ia | 0 | 0% | 14% | | | |
| 090 | Ia | 0 | 0% | 0% | | | |
| H36B | Ib | | | | 105 | 34% | 32% |

Thus, inclusion of a non-AI protein in an immunogenic composition of the invention may provide increased protection a mammal.

[1496] The immunogenic compositions comprising S. pneumonaie AI polypeptides may further secondary SP protein antigens which include (a) any of the SP protein antigens disclosed in WO 02/077021 or U.S. provisional application ______, filed Apr. 20, 2005 (Attorney Docket Number 002441.00154), (2) immunogenic portions of the antigens comprising at least 7 contiguous amino acids, (3) proteins comprising amino acid sequences which retain immunogenicity and which are at least 95% identical to these SP protein antigens (e.g., 95%, 96%, 97%, 98%, 99%, or 99.5% identical), and (4) fusion proteins, including hybrid SP protein antigens, comprising (1-3).

[1497] Alternatively, the invention may include an immunogenic composition comprising a first and a second Gram positive bacteria non-AI protein, wherein the polynucleotide sequence encoding the sequence of the first non-AI protein is less than 90% (i.e., less than 90, 88, 86, 84, 82, 81, 78, 176, 74, 72, 70, 65, 60, 55, 50, 45, 40, 35, or 30 percent) homologous than the corresponding sequence in the genome of the second non-AI protein.

[1498] The compositions of the invention may further comprise one or more additional non-Gram positive bacterial antigens, including additional bacterial, viral or parasitic antigens. The compositions of the invention may further comprise one or more additional non-GBS antigens, including additional bacterial, viral or parasitic antigens.

[1499] In another embodiment, the GBS antigen combinations of the invention are combined with one or more additional, non-GBS antigens suitable for use in a vaccine designed to protect elderly or immunocompromised individuals. For example, the GBS antigen combinations may be combined with an antigen derived from the group consisting of Enterococcus faecalis, Staphylococcus aureus, Staphylococcus epidermis, Pseudomonas aeruginosa, Legionella pneumophila, Listeria monocytogenes, Neisseria meningitides, influenza, and Parainfluenza virus (‘PIV’).

[symbol]

protein in order to enhance immunogenicity {e.g. Ramsay et al. (2001) Lancet 357(9251): 195-196; Lindberg (1999) Vaccine 17 Suppl 2:S28-36; Buttery & Moxon (2000) JR Coll Physician Lond 34:163-168; Ahrmad & Chapnick (1999) Infect Dis Clin North Am 13:113-133, vii.; Goldblatt (1998) J. Med. Microbiol. 47:563-567; European patent 0 477 508; U.S. Pat. No. 5,306,492; International patent application WO98/42721; Conjugate Vaccines (eds. Cruse et al.) ISBN 3805549326, particularly vol. 10:48-114; and Hermanson (1996) Bioconjugate Techniques ISBN: 0123423368 or 012342335X}. Preferred carrier proteins are bacterial toxins or toxoids, such as diphtheria or tetanus toxoids. The CRM₁₉₇ diphtheria toxoid is particularly preferred {Research Disclosure, 453077 (January 2002)}. Other carrier polypeptides include the N. meningitidis outer membrane protein (EP-A-0372501), synthetic peptides (EP-A-0378881; BP-A-0427347), heat shock proteins (WO 93/17712; WO 94/03208), pertussis proteins (WO 98/58668; EP A 0471177), protein D from H. influenzae (WO 00/56360), cytokines (WO 91/01146), lymphokines, hormones, growth factors, toxin A or B from C. difficile (WO00/61761), iron-uptake proteins (WO01/72337), etc. Where a mixture comprises capsular saccharides from both serogroups A and C, it may be preferred that the ratio (w/w) of MenA saccharide:MenC saccharide is greater than 1 (e.g. 2:1, 3:1, 4:1, 5:1, 10:1 or higher). Different saccharides can be conjugated to the same or different type of carrier protein. Any suitable conjugation reaction can be used, with any suitable linker where necessary.

[1500] Toxic protein antigens may be detoxified where necessary e.g. detoxification of pertussis toxin by chemical and/or genetic means.

[1501] Where a diphtheria antigen is included in the composition it is preferred also to include tetanus antigen and pertussis antigens. Similarly, where a tetanus antigen is included it is preferred also to include diphtheria and pertussis antigens. Similarly, where a pertussis antigen is included it is preferred also to include diphtheria and tetanus antigens.

[1502] Antigens in the composition will typically be present at a concentration of at least 1 μg/ml each. In general, the concentration of any given antigen will be sufficient to elicit an immune response against that antigen.

[1503] As an alternative to using protein antigens in the composition of the invention, nucleic acid encoding the antigen may be used {e.g. refs. Robinson & Torres (1997) Seminars in Immunology 9:271-283; Donnelly et al. (1997) Annu Rev Immunol 15:617-648; Scott-Taylor & Dalgleish (2000) Expert Opin Investig Drugs 9:471-480; Apostolopoulos & Plebanski (2000) Curr Opin Mol flier 2:441-447; Ilan (1999) Curr Opin Mol Ther 1:116-120; Dubensky et al. (2000) Mol Med 6:723-732; Robinson & Pertmer (2000) Adv Virus Res 55:1-74; Donnelly et al. (2000) Am J Respir Crit Care Med 162(4 Pt 2):S190-193; and Davis (1999) Mt. Sinai J. Med. 66:84-90}. Protein components of the compositions of the invention may thus be replaced by nucleic acid (preferably DNA e.g. in the form of a plasmid) that encodes the protein.

[symbol]

[1504] The term “comprising” means “including” as well as “consisting” e.g. a composition “comprising” X may consist exclusively of X or may include something additional e.g. X+Y.

[1505] The term “about” in relation to a numerical value x means, for example, x±10%.

[1506] References to a percentage sequence identity between two amino acid sequences means that, when aligned, that percentage of amino acids are the same in comparing the two sequences. This alignment and the percent homology or sequence identity can be determined using software programs known in the art, for example those described in section 7.7.18 of Current Protocols in Molecular Biology (F. M. Ausubel et al., eds., 1987) Supplement 30. A preferred alignment is determined by the Smith-Waterman homology search algorithm using an affine gap search with a gap open penalty of 12 and a gap extension penalty of 2, BLOSUM matrix of 62. The Smith-Waterman homology search algorithm is disclosed in Smith & Waterman (1981) Adv. Appl. Math. 2: 482-489.

[1507] The invention is further illustrated, without limitation, by the following examples.

### EXAMPLE 1

### Binding of an Adhesin Island Surface Protein, GBS 80, to Fibrinogen and Fibronectin

[1508] This example demonstrates that an Adhesin Island surface protein, GBS 80 can bind to fibrinogen and fibronectin.

[1509] An enzyme-linked immunosorbent assay (ELISA) was used to analyse the in vitro binding ability of recombinant GBS 80 to immobilized extra-cellular matrix (ECM) proteins but not to bovine serum albumin (BSA). Microtiter plates were coated with ECM proteins (fibrinogen, fibronectin, laminin, collagen type IV) and binding assessed by adding varying concentrations of a recombinant form of GBS 80, over-expressed and purified from E. coli (FIG. 5A). Plates were then incubated sequentially with a) mouse anti-GBS 80 primary antibody; b) rabbit anti-mouse AP-conjugated secondary antibody; c) pNPP colorimetric substrate. Relative binding was measured by monitoring absorbance at 405 nm, using 595 nm as a reference wavelength. FIG. 5b shows binding of recombinant GBS 80 to immobilized ECM proteins (1 μg) as a function of concentration of GBS 80. BSA was used as a negative control. Data points represent the means of OD₄₀₅ values±standard deviation for 3 wells.

[1510] Binding of GBS 80 to the tested ECM proteins was found to be concentration dependent and exhibited saturation kinetics. As is also evident from FIG. 5, binding of GBS 80 to fibronectin and fibrinogen was greater than binding to laminin and collagen type IV at all the concentrations tested.

### EXAMPLE 2

### GBS 80 is Required for Surface Localization of GBS 104

[1511] This example demonstrates that co-expression of GBS 80 is required for surface localization of GBS 104.

[1512] The polycistronic nature of the Adhesin Island I mRNA was investigated through reverse transcriptase-PCR (RT-PCR) analysis employing primers designed to detect transcripts arising from contiguous genes. Total RNA was isolated from GBS cultures grown to an optical density at 600 nm

[symbol]

according to the manufacturer's instructions. The absence of contaminating chromosomal DNA was confirmed by failure of the gene amplification reactions to generate a product detectable by agarose gel electrophoresis, in the absence of reverse transcriptase. RT-PCR analysis was performed with the Access RT-PCR system (Promega) according to the manufacturer's instructions, employing PCR cycling temperatures of 60° C. for annealing and 70° C. for extension. Amplification products were visualized alongside 100-bp DNA markers in 2% agarose gels after ethidium bromide staining.

[1513] FIG. 5 shows that all the genes are co-transcribed as an operon. A schematic of the AI-1 operon is shown above the agarose gel analysis of the RT-PCR products. Large rectangular arrows indicate the predicted transcript direction. Primer pairs were selected such as “1-4” cross the 3′finish-5′start of successive genes and overlap each gene by at least 200 bp. Additionally, “1” crosses a putative rho-independent transcriptional terminator. “5” is an internal GBS 80 control and “6” is an unrelated control from a highly expressed gene. Lanes: “a”: RNA plus RTase enzyme; “b” RNA without RTase; “c”: genomic DNA control.

[1514] In the effort to elucidate the functions of the AI-1 proteins, in frame deletions of all of the genes within the operon have been constructed and the resulting mutants characterized with respect to surface exposure of the encoded antigens (see FIG. 8).

[1515] Each in-frame deletion mutation was constructed by splice overlap extension PCR (SOE-PCR) essentially as described by Horton et al. [Horton R. M., Z. L. Cai, S, N. Ho, L. R. Pease (1990) Biotechniques 8:528-35] using suitable primers and cloned into the temperature sensitive shuttle vector pJRS233 to replace the wild type copy by allelic exchange [Perez-Casal, J., J. A. Price, et al. (1993) Mol Microbiol 8(5): 809-19.]. All plasmid constructions utilized standard molecular biology techniques, and the identities of DNA fragments generated by PCR were verified by sequencing. Following SOE-PCR, the resulting mutant DNA fragments were digested with XhoI and EcoRI, and ligated into a similarly digested pJRS233. The resulting vectors were introduced by electroporation into the chromosome of 2603 and COH1 GBS strains in a three-step process, essentially as described in Framson et al. [Framson, P. E., A. Nittayajarn, J. Merry, P. Youngman, and C. E. Rubens. (1997) Appl. Environ. Microbiol. 63(9):3539-47]. Briefly, the vector pJRS233 contains an erm gene encoding erythromycin resistance and a temperature-sensitive gram-positive replicon that is active at 30° C. but not at 37° C. Initially, the constructs are electroporated into GBS electro-competent cells prepared as described by Frameson et al., and transformants containing free plasmid are selected by their ability to grow at 30° C. on Todd-Hewitt Broth (THB) agar plates containing 1 μg/ml erythromycin. The second step includes a selection step for strains in which the plasmid has integrated into the chromosome via a single recombination event over the homologous plasmid insert and chromosome sequence by their ability to grow at 37° C. on THB agar medium containing 1 mg/ml erythromycin. In the third step, GBS cells containing the plasmid integrated within the chromosome (integrants) are serially passed in broth culture in the absence of antibiotics at 30° C. Plasmid excision

[symbol]

either completed the allelic exchange or reconstituted the wild-type genotype. Subsequent loss of the plasmid in the absence of antibiotic selection pressure resulted in an erythromycin-sensitive phenotype. In order to assess gene replacement a screening of erythromycin-sensitive colonies was performed by analysis of the target gene PCR amplicons.

[1516] FIG. 7 reports a schematic of the IS-1 operon for each knock-out strain generated, along with the deletion position within the amino acidic sequence. Most data presented here concern the COH1 deletion strains, in which the expression of each of the antigens is higher by DNA microarray analysis (data not shown) as well as detectable by FACS analysis (see FIG. 8). The double mutant in 2603 Δ80, Δ104 double mutant was constructed by sequential allelic exchanges of the shown alleles.

[1517] Immunization Protocol

[1518] Immune sera for FACS experiments were obtained as follows.

[1519] Groups of 4 CD-1 outbred female mice 6-7 weeks old (Charles River Laboratories, Calco Italy) were immunized with the selected GBS antigens, (20 μg of each recombinant GBS antigen), suspended in 100 μl of PBS. Each group received 3 doses at days 0, 21 and 35. Immunization was performed through intra-peritoneal injection of the protein with an equal volume of Complete Freund's Adjuvant (CPA) for the first dose and Incomplete Freund's Adjuvant (IFA) for the following two doses. In each immunization scheme negative and positive control groups are used. Immune response was monitored by using serum samples taken on day 0 and 49.

[1520] FACS Analysis

[1521] Preparation of paraformaldehyde treated GBS cells and their FACS analysis were carried out as follows.

[1522] GBS serotype COH1 strain cells were grown in Todd Hewitt Broth (THB; Difco Laboratories, Detroit, Mich.) to OD600 nm=0.5. The culture was centrifuged for 20 minutes at 5000 rpm and bacteria were washed once with PBS, resuspended in PBS containing 0.05% paraformaldehyde, and incubated for 1 hours at 37° C. and then overnight at 4° C. 50 μl of fixed bacteria (OD600 0.1) were washed once with PBS, resuspended in 20 μl of Newborn Calf Serum, (Sigma) and incubated for 20 min. at room temperature. The cells were then incubated for 1 hour at 4° C. in 100 μl of preimmune or immune sera, diluted 1:200 in dilution buffer (PBS, 20% Newborn Calf Serum, 0.1% BSA). After centrifugation and washing with 200 μl of washing buffer (0.1% BSA in PBS), samples were incubated for 1 hour at 4° C. with 50 μl of R-Phicoerytrin conjugated F(ab)2 goat anti-mouse IgG (Jackson ImmunoResearch Laboratories; Inc.), diluted 1:100 in dilution buffer. Cells were washed with 200 μl of washing buffer and resuspended in 200 μl of PBS. Samples were analysed using a FACS Calibur apparatus (Becton Dickinson, Mountain View, Calf.) and data were analyzed using the Cell Quest Software (Becton Dickinson). A shift in mean fluorescence intensity of >75 channels compared to preimmune sera from the same mice was considered positive. This cutoff

[symbol]

against mock purified recombinant proteins from cultures of E. coli carrying the empty expression vector and included in every experiment. Artifacts due to bacterial lysis were excluded using antisera raised against 6 different known cytoplasmic proteins all of which were negative

[1523] FACS data on COH1 single KO mutants for GBS 104 and GBS 80 indicated that GBS 80 is required for surface localization of GBS 104.

[1524] As shown in FIG. 8, GBS 104 is not surface exposed in the Δ80 strain (second column, bottom), but is present in the whole protein extracts (see FIG. 10). Mean shift values suggest that GBS 104 is partially responsible for GBS 80 surface exposure (Mean shift of GBS 80 is reduced to ˜60% wild-type levels in Δ104), and that GBS 80 is over-expressed in the complemented strain (mean shift value ˜200% wild-type level). The Δ80/pGBS 80 strain contains the GBS 80 orf cloned in the shuttle-vector pAM401 (Wirth, R., F. Y. An, et al. (1986). J Bacteriol 165(3): 831-6). The vector alone does not alter the secretion pattern of GBS 104 (right column). FACS was performed on mid-log fixed bacteria with mouse polyclonal antibodies as indicated at left. Black peak is pre-immune 15 sera, colored peaks are sera from immunized animals.

### EXAMPLE 3

### Deletion of GBS 80 Causes Attenuation In Vivo

[1525] This example demonstrates that deletion of GBS 80 causes attenuation in vivo, suggesting that this protein contributes to bacterial virulence.

[1526] By using a mouse animal model, we studied the role of GBS 80 and GBS 104 in the virulence of S. agalactiae.

[1527] Groups of ten outbred female mice 5-6 week weeks old (Charles River Laboratories, Calco Italy) were inoculated intraperitoneally with different dilutions of the mutant strains and LD50 (lethal dose 50) were calculated according to the method of Reed and Muench [Reed, L. J. and H. Muench (1938). The American Journal of Hygiene 27(3): 493-7]. As presented in the table below the number of colony forming units (cfu) counted for both the Δ80 and the Δ80, Δ104 double mutants is about 10 fold higher when compared to the wild type strain suggesting that inactivation of GBS 80 but not GBS 104 is responsible for an attenuation in virulence. This finding indicates that GBS 80 gene in the AI-1 might contribute to virulence.

TABLE
Lethal dose 50% analysis of AI-1 mutants in the 2603 strain
background. LD50s were performed by IP injection of female
CD1 mice at an age of 5-6 weeks.
LD50s were calculated by the method of Reed and Muench (8).

| | | Number |
|---|---|---|
| GBS strain | LD₅₀, cfu | of Experiments |
| Wild Type 2603 | 2 × 10⁸ | 4 |
| Δ104 mutant | ~2 × 10⁸ | 1 |
| Δ80 mutant | 2.6 × 10⁹ | 3 |
| Δ80, Δ104 double mutant | ~2 × 10⁹ | 1 |

### EXAMPLE 4

### Effect of Adhesion Island Sortase Deletions on Surface Antigen Presentation

[1528] presentation.

[1529] FACS analysis results set forth in FIG. 9 show that a deletion in sortase SAG0648 prevented GBS 104 from reaching the surface and slightly reduced the surface exposure of GBS 80 (fourth panel; mean shift value ˜60% wild-type COH1). In the double sortase knock-out strain, neither antigen was surface exposed (far right panel). Either sortase alone was sufficient for GBS 80 to arrive at the bacterial surface (third and fourth columns, top). No effect was seen on surface exposure of antigens GBS 80 or GBS 104 in the ΔGBS 52 strain. Antibodies derived from purified GBS 52 were either non-specific or were FACS negative for GBS 52 (data not shown). FACS analysis was performed as described above (see EXAMPLE 2).

[1530] As shown in FIG. 10, inactivation of GBS 80 has no effect on GBS 104 expression as much as GBS 104 knock out doesn't change the total amount GBS 80 expressed. The Western blot of whole protein extracts (strains noted above lanes) probed with anti-GBS 80 antisera is shown in panel A. Arrow indicates expected size of GBS 80 (60 kDa). GBS 80 antibodies recognize a doublet, the lower band is not present in ΔGBS 80 strains. Panel B shows a Western blot of whole protein extracts probed with anti-GBS 104 antisera Arrow indicates expected size of GBS 104 (99.4 kDa). Protein extracts were prepared from the same bacterial cultures used for FACS (FIGS. 8 and 9). In conclusion, although GBS 104 does not arrive at the surface in the Δ80 strain by FACS (FIG. 8, second column), it is present at approximately wild-type levels in the whole protein preps (B, second lane). Approximately 20 μg of each protein extract was loaded per lane.

[1531] Western-Blot Analysis

[1532] Aliquots of total protein extract mixed with SDS loading buffer (1×: 60 mM TRIS-HCl pH 6.8, 5% w/v SDS, 10% v/v glycerin, 0.1% Bromophenol Blue, 100 mM DTT) and boiled 5 minutes at 95° C., were loaded on a 12.5% SDS-PAGE precast gel (Biorad). The gel is run using a SDS-PAGE running buffer containing 250 mM TRIS, 2.5 mM Glycine and 0.1% SDS. The gel is electroblotted onto nitrocellulose membrane at 200 mA for 60 minutes. The membrane is blocked for 60 minutes with PBS/0.05% Tween-20 (Sigma), 10% skimmed milk powder and incubated O/N at 4° C. with PBS/0.05% Tween 20, 1% skimmed milk powder, with the appropriate dilution of the sera. After washing twice with PBS/0.05% Tween, the membrane is incubated for 2 hours with peroxidase-conjugated secondary anti-mouse antibody (Amersham) diluted 1:4000. The nitrocellulose is washed three times for 10 minutes with PBS/0.05% Tween and once with PBS and thereafter developed by Opti-4CN Substrate Kit (Biorad).

### EXAMPLE 5

### Binding of Adhesin Island Proteins to Epithelial Cells and Effect of Adhesin Island Proteins on Capacity of GBS to Adhere to Epithelial Cells

[1533] This example illustrates the binding of AI proteins to epithelial cells and the effect of AI proteins on the capacity of GBS to adhere to epithelial cells.

[1534] Applicants analysed whether recombinant AI surface proteins GBS 80 or GBS 104 would demonstrate binding to various epithelial cells in a FACS analysis. Applicants also analysed whether

[symbol]

invade ME180 cervical epithelial cells.

[1535] As shown in FIG. 28, deletion of GBS 80 sequence from GBS strain isolate 2603 (serotype V) did not affect the capacity of the mutated GBS to adhere to and invade ME180 cervical epithelial cells. Here ME180 cervical carcinoma epithelial cells were infected with wild type GBS 2603 or GBS 2603 Δ80 isogenic mutant. After two hours of infection, non-adherent bacteria were washed off and infection prolonged for a further two hours and four hours. In invasion experiments, after each time point, was followed by a two hour antibiotic treatment. Cells were then lysed with 1% saponin and lysates plated on TSA plates. As shown in FIG. 28, there was little difference between the percent invasion or percent adhesion of wild type and mutant strains up to the four hour time point.

[1536] FIG. 30 repeats this experiment with both Δ104 and Δ80 mutants from a different strain isolate. Here, ME180 cervical carcinoma epithelial cells were infected with GBS strain isolate COH (serotype III) wild type or COH1 ΔGBS 104 or COH1 Δ80 isogenic mutant. After one hour of infection, non-adherent bacteria were washed off and the cells were lysed with 1% saponin. The lysates were plated on TSA plates. As shown in FIG. 30, while there was little difference in the percent invasion, there was a significant decrease in the percent association of the Δ104 mutant compared to both the wild type and Δ80 mutant.

[1537] The affect of AI surface proteins on the ability of GBS to translocate through an epithelial monolayer was also analysed. As shown in FIG. 31, a GBS 80 knockout mutant strain partially loses the ability to translocate through an epithelial monolayer. Here epithelial monolayers were inoculated with wildtype or knockout mutant in the apical chamber of a transwell system for two hours and then non-adherent bacteria were washed off. Infection was prolonged for a further two and four hours. Samples were taken from the media of the basolateral side and the number of colony forming unties measured. Transepithelial electrical resistance measured prior to and after infection gave comparable values, indicating the maintenance of the integrity of the monolayer. By the six hour time point, the Δ80 mutants demonstrated a reduced percent transcytosis.

[1538] A similar experiment was conducted with GBS 104 knock out mutants. Here, as shown in FIG. 22, the Δ104 mutants also demonstrated a reduced percent transcytosis, indicating that the mutant strains translocate through an epithelial monolayer less efficiently than their isogenic wild type counterparts.

[1539] Applicants also studied the effect of AI proteins on the capacity of a GBS strain to invade 3774 macrophage-like cells. Here, J774 cells were infected with GBS COH1 wild type or COH1 ΔGBS104 or COH1 ΔGBS80 isogenic mutants. After one hour of infection, non-adherent bacteria were washed off and intracellular bacteria were recovered at two, four and six hours post antibiotic treatment. At each time point, cells were lysed with 0.25% Triton X-100 and lysates plated on TSA plates. As shown in FIG. 32, the Δ104 mutant demonstrated a significantly reduced percent invasion compared to both the wild type and Δ80 mutant.

[symbol]

[1540] This example illustrates hyperoligomeric structures comprising AI surface proteins GBS 80 and GBS 104. A GBS isolate COH1 (serotype III) was adapted to increase expression of GBS 80. FIG. 34 presents a regular negative stain electron micrograph of this mutant; no pilus or hyperoligomeric structures are distinguishable on the surface of the bacteria. When the EM stain is based on anti-GBS 80 antibodies labelled with 10 or 20 nm gold particles, the presence of GBS 80 throughout the hyperoligomeric structure is clearly indicated (FIGS. 36, 37 and 38). EM staining against GBS 104 (anti-GBS 104 antibodies labelled with 10 nm gold particles) also reveals the presence of GBS 104 primarily on or near the surface of the bacteria or potentially associated with bacterial peptidoglycans (FIG. 39). Analysis of this same strain (over-expressing GBS 80) with a combination of both anti-GBS 80 (using 20 nm gold particles) and anti-GBS 104 (using 10 nm gold particles) reveals the presence of GBS 104 on the surface and within the hyperoligomeric structures (see FIGS. 40 and 41).

### EXAMPLE 7

### GBS 80 is Necessary for Polymer Formation and GBS 104 and Sortase SAG0648 are Necessary for Efficient Pill Assembly

[1541] This example demonstrates that GBS 80 is necessary for formation of polymers and that GBS 104 and sortase SAG0648 are necessary for efficient pili assembly. GBS 80 and GBS 104 polymeric assembly was systematically analyzed in Coh1 strain single knock out mutants of each of the relevant coding genes in AI-1 (GBS 80, GBS 104, GBS 52, sag0647, and sag0648). FIG. 41 provides Western blots of total protein extracts (strains noted above lanes) probed with either anti-GBS 80 (left panel) sera or anti-GBS 104 sera (right panel) for each of these Coh1 and Coh1 knock out strains. (Coh1, wild type Coh1; Δ80, Coh1 with GBS 80 knocked out; Δ104, Coh1 with GBS 104 knocked out; Δ52, Coh1 with GBS 52 knocked out; Δ647, Coh1 with SAG0647 knocked out; Δ648, Coh1 with SAG0648 knocked out, A647-8, Coh1 with SAG0647 and SAG0648 knocked out; Δ80/pGBS80, Coh1 with GBS 80 knocked out but complemented with a high copy number plasmid expressing GBS 80. Asterisks identify the monomer of GBS 80 and GBS 104.)

[1542] The smear of immunoreactive material observed in the wild type strain, along with its disappearance in Δ80 and Δ104 mutants, is consistent with the notion that such high molecular weight structures are composed of covalently linked (SDS-resistant) GBS 80 and GBS 104 subunits. The immunoblotting with both anti-GBS 80 (α-GBS 80) and anti-GBS 104 (α-GBS 104) revealed that deletion of sortase SAG0648 also interferes with the assembly of high molecular weight species, whereas the knock out mutant of the second sortase (SAG0647), even if somehow reduced, still maintains the ability to form polymeric structures.

[1543] Total extracts form GBS were prepared as follows. Bacteria were grown in 50 ml of Todd-Hewitt broth (Difco) to an OD₆₀₀ₙₘ of 0.5-0.6 and successively pelleted. After two washes in PBS the pellet was resuspended and incubated 3 hours at 37° C. with mutanolisin. Cells were then lysed with at

[symbol]

eliminate the cellular was quantified. Approximately 40 μg of each protein extract was separated on SDS-PAGE. The gel was then subjected to immunoblotting with mice antisera and detected with chemiluminescence.

### EXAMPLE 8

### GBS 80 is Polymerized by an AI-2 Sortase

[1544] This example illustrates that GBS 80 can be polymerized not only by AI-1 sortases, but also by AI-2 sortases. FIG. 42 shows total cell extract immunoblots of GBS 515 strain, which lacks AI-1. The left panel, where an anti-GBS 67 sera was used, shows that GBS 67 from AI-2 is assembled into high-molecular weight-complexes, suggesting the formation of a second type of pilus. The same high molecular structure is observed when GBS 80 is highly expressed by reintroducing the gene within a plasmid (pGBS 80). By using anti-GBS 80 (right panel) sera on the same extracts, again it is observed that, with GBS 80 over expression (515/pGBS 80), a high-molecular weight structure is assembled. This implies that, in the absence of AI-1 sortases, AI-2 sortases (SAG1405 and SAG1406) can complement the lacking function, still being able to assemble GBS 80 in a pilus structure.

### EXAMPLE 9

### Coh1 Produces a High Molecular Weight Molecule, the GBS 80 Pilin

[1545] This example illustrates that Coh1 produces a high molecular weight molecule, greater than 1000 kDa, which is the GBS 80 pilin. FIG. 43 provides silver-stained electrophoretic gels that show that Coh1 produces two macromolecules. One of these macromolecules disappears in the Coh1 GBS 80 knock out cells, but does not disappear in the Coh1 GBS 52 knock out mutant cells. The last two lanes on the right were loaded with 15 times the amount loaded in the other lanes. This was done in order to be able to count the bands. By doing this, a conservative size estimate of the top bands was calculated by starting at 240 kDa and considering each of 14 higher bands as the result of consecutive additions of a GBS 80 monomer.

[1546] Coh1, wild type Coh1; Δ80, Coh1 cells with GBS 80 knocked out; Δ52, Coh1 cells with GBS 52 knocked out; Δ80/pGBS 80, Coh1 cells with GBS 80 knocked out and complemented with a high copy number construct expressing GBS 80.

### EXAMPLE 10

### GBS 52 is a Minor Component of the GBS Pilus

[1547] This example illustrates that GBS 52 is present in the GBS pilus and is a minor component of the pilus. FIG. 45 shows an immunoblot of total cell extracts from a GBS Coh1 strain and a GBS Coh1 strain knocked out for GBS 52 (Δ52). The total cell extracts were immunoblotted anti-GBS 80 antisera (left) and anti-GBS 52 antisera (right). Immunoblotting was performed using a 3-8% Tris-acetate polyacrylamide gel (Invitrogen) which provided excellent separation of large molecular weight proteins (see FIG. 41). When the gel was incubated with anti-GBS 80 sera, the bands from the Coh1 wild-type strain appeared shifted when compared to the Δ52 mutant. This observation

[symbol]

was shipped and incubated with anti-GBS 52 sera the high-molecular subunits in the Coh1 wild-type strain showed similar molecular size of those in the correspondent lane in the left panel. These findings confirmed that GBS 52 is indeed associated with GBS 80 macro-molecular structures but represents a minor component of the GBS pilus.

### EXAMPLE 11

### Pilus Structures are Present in the Supernatant of GBS Bacterial Cultures

[1548] This example illustrates that the pilus structure assembled in Coh1 GBS is present in the supernatant of a bacterial cell culture. FIG. 46 shows an immunoblot where the protein extract of the supernatant from cultures of different GBS mutant strains (117=Coh1 GBS 80 knockout; 159=Coh1 GBS 104 knockout; 202=Coh1 GBS 52 knockout; 206=Coh1 GBS sag0647 knockout; 208=Coh1 GBS sag0648 knockout; 197=Coh1 GBS sag0647/sag0648 knockout; 179=Coh1 GBS 80 knockout complemented with a high copy plasmid expressing GBS 80). GBS 80 antisera detects the presence of pilus structures in the appropriate Coh1 strains.

[1549] The protein extract was prepared as follows. Bacteria were grown in THB to an OD₆₀₀ₙₘ of 0.5-0.6 and the supernatant was separated from the cells by centrifugation. The supernatant was then filtered (Ø0.2 μm) and 1 ml was added with 60% TCA for protein precipitation. GBS pili were also extracted from the fraction of surface-exposed proteins in Coh1 strain and its GBS 80 knock out mutant as described hereafter. Bacteria were grown to an OD₆₀₀ₙₘ of 0.6 in 50 ml of THB at 37° C. Cells were washed once with PBS and the pellet was then resuspended in 0.1 M KPO4 pH 6.2, 40% sucrose, 10 mM MgCl2, 400 U/ml mutanolysin and incubated 3 hours at 37° C. Protoplasts were separated by centrifugation and the supernatant was recovered and its protein content measured.

[1550] In order to study the dynamics of pilus production during different growth phases, 1 ml supernatant of a culture at different OD₆₀₀ₙₘ was TCA precipitated and loaded onto a 3-8% SDS-PAGE as described before. FIG. 47 shows the corresponding Western blot with GBS 80 anti-sera. The first group of lanes (left five sample lanes) refer to a Coh1 strain growth (OD₆₀₀ₙₘ are noted above the lanes) whereas the second group of lanes (right five samples) are from a GBS 80 knock out strain over expressing GBS 80. The experiment shows that pilus macromolecular structures can be found in the supernatant in all of the growth phases tested.

### EXAMPLE 12

### In GBS Strain Coh1, Only GBS 80 and a Sortase (sag0647 or sag0648) is Required for Polymerization

[1551] This example describes requirements for pilus formation in Coh1. FIG. 48 shows a Western blot of total protein extracts (prepared as described before) using anti-GBS 80 sera on Coh1 clones. (Coh1, wild type Coh1; Δ104, Coh1 knocked out for GBS 104, Δ647, Coh1 knocked out for sag0647, Δ648, Coh1 knocked for sag0648, Δ647-8, Coh1 knocked out for sag0647 and sag0648; 515, wild

[symbol]

80.) The data show that only the double sortase mutant is unable to polymerize GBS 80 indicating that the ‘conditio sine qua non’ for pilus polymerization is the co-existence of GBS 80 with at least one sortase. This result leads to a reasonable assumption that SAG1405 and SAG1406 are responsible for polymerization in this strain.

### EXAMPLE 13

### GBS 80 can be Expressed in L. Lactis Under its Own Promoter and Terminator Sequences

[1552] This example demonstrates that L. lactis, a non-pathogenic bacterium, can express GBS AI polypeptides such as GBS 80. L. lactis M1363 (J. Bacteriol. 154 (1983):1-9) was transformed with a construct encoding GBS 80. Briefly, the construct was prepared by cloning a DNA fragment containing the gene coding for GBS 80 under its own promoter and terminator sequences into plasmid pAM401 (a shuttle vector for E. coli and other Gram positive bacteria; J. Bacteriol. 163 (1986):831-836). Total extracts of the transformed bacteria in log phase were separated on SDS-PAGE, transferred to membranes, and incubated with antiserum against GBS 80. A polypeptide corresponding to the molecular weight of GBS 80 was detected in the lanes containing total extracts of L. lactis transformed with the GBS 80 construct. See FIGS. 133A and 133B, lanes 6 and 7. This same polypeptide was not detected in the lane containing total extracts of L. lactis not transformed with the GBS 80 construct, lane 9. This example shows that L. lactis can express GBS 80 under its own promoter and terminator.

### EXAMPLE 14

### L. lactis Modified to Express GBS AI-1 Under the GBS 80 Promoter and Terminator Sequences Expresses GBS 80 in Polymeric Structures

[1553] This example demonstrates the ability of L. lactis to express GBS AI-1 polypeptides and to incorporate at least some of the polypeptides into oligomers. L. lactis was transformed with a construct containing the genes encoding GBS AI-1 polypeptides. Briefly, the construct was prepared by cloning a DNA fragment containing the genes for GBS 80, GBS 52, SAG0647, SAG0648, and GBS 104 under the GBS 80 promoter and terminator sequences into construct pAM401. The construct was transformed into L. lactis M1363. Total extracts of log phase transformed bacteria were separated on reducing SDS-PAGE, transferred to membranes, and incubated with antiserum against GBS 80. A polypeptide with a molecular weight corresponding to the molecular weight of GBS 80 was detected in the lanes containing L. lactis transformed with the GBS AI-1 encoding construct. See FIG. 134, lane 2. In addition, the same lane also showed immunoreactivity of polypeptides having higher molecular weights than the polypeptide having the molecular weight of GBS 80. These higher molecular weight polypeptides are likely oligomers of GBS 80. Oligomers of similar molecular

[symbol]

See lane 4 of FIG. 135. Thus, this example shows that L. lactis transformed to express GBS AI-1 can efficiently polymerize GBS 80 in the form of a pilus. This pilus structure can likely be purified from either the cell culture supernatant or cell extracts.

### EXAMPLE 15

### Cloning and Expression of S. pneumoniae Sp0462

[1554] This example describes the production of a clone encoding a Sp0462 polypeptide and expression of the clone. To produce a clone encoding Sp0462, the open reading frame encoding Sp0462 was amplified using primers that annealed within the full-length Sp0462 open reading frame sequence. FIG. 150A provides a 893 amino acid sequence of Sp0462. The primers used to produce a clone encoding the Sp0462 polypeptide are shown in FIG. 150B. These primers annealed to the nucleotide sequences encoding the amino acid residues indicated by underlining in FIG. 150A. Amplification of the open reading frame encoding Sp0462 using these primers produced the amplicon shown at lane 2 of the agarose gel provided in FIG. 160. The Sp0462 clone encodes amino acid residues 38-862 of the 893 amino acid residue Sp0462 protein; the italicized residues in FIG. 150A were eliminated. FIG. 151A provides a schematic depiction of the recombinant Sp0462 polypeptide. FIG. 151B shows a schematic depiction of the full-length Sp0462 polypeptide. Both the recombinant Sp0462 encoded by the clone and the full-length Sp0462 protein have two collagen binding protein type B (Cna B) domains and a von Hillebrand factor A (vWA) domain. The cloned recombinant Sp0462 lacks the LPXRG motif present in the full-length Sp0462 protein. Western blot analysis for expression of the Sp0462 clone did not result in detection of polypeptides with serum obtained from S. pneumoniae-infected patients (FIG. 152A) or GBS 80 antiserum (FIG. 152B).

### EXAMPLE 16

### Cloning and Expression of S. pneumoniae Sp0463

[1555] This example describes the production of a clone encoding a Sp0463 polypeptide and detection of recombinant Sp0463 polypeptide expressed from the clone. To produce a clone encoding Sp0463, the open reading frame encoding Sp0463 was amplified using primers that annealed within the full-length Sp0463 open reading frame sequence. FIG. 153A provides a 665 amino acid sequence of Sp0463. The primers used to produce the clone encoding Sp0463 polypeptide are shown in FIG. 153B. These primers annealed to the nucleotide sequences encoding the amino acid residues indicated by underlining in FIG. 153A. Amplification of the open reading frame encoding Sp0463 using these primers produced the amplicon shown at lane 3 of the agarose gel provided in FIG. 160. The Sp0463 clone encodes amino acid residues 23-627 of the 665 amino acid residue Sp0463 protein; the italicized residues in FIG. 153A were eliminated. FIG. 154A provides a schematic depiction of the recombinant Sp0463 polypeptide. FIG. 154B shows a schematic depiction of the full-length Sp0463 polypeptide. Both the recombinant Sp0463 encoded by the clone and the full-length Sp0463 protein have a Cna B domain and an E box motif. The cloned recombinant

[symbol]

clone resulted in the detection of a 60 kD polypeptide, the expected molecular weight of the recombinant Sp0463 polypeptide, by Western blot analysis. See FIG. 155.

### EXAMPLE 17

### Cloning and Expression of S. pneumoniae Sp0464

[1556] This example describes the production of a clone encoding a Sp0464 polypeptide and detection of recombinant Sp0464 polypeptide expressed from the clone. To produce a clone encoding Sp0464, the open reading frame encoding Sp0464 was amplified using primers that annealed either within the full-length Sp0464 open reading frame sequence. FIG. 157A provides a 393 amino acid sequence of Sp0464. The primers used to produce a clone encoding the Sp0464 polypeptide are shown in FIG. 157B. These primers annealed to the nucleotide sequences encoding the amino acid residues indicated by underlining in FIG. 157A. Amplification of the open reading frame encoding Sp0464 using these primers produced the amplicon shown at lane 4 of the agarose gel provided in FIG. 160. The Sp0464 clone encodes amino acid residues 19-356 of the 393 amino acid residue Sp0464 protein; the italicized residues in FIG. 157A were eliminated. FIG. 158A provides a schematic depiction of the recombinant Sp0464 polypeptide. FIG. 158B shows a schematic depiction of the full-length Sp0464 polypeptide. Both the recombinant Sp0464 encoded by the clone and the full-length Sp0464 protein have two Cna B domains. The cloned recombinant Sp0464 lacks the LPXTG motif present in the full-length Sp0464 protein. Expression of the Sp0464 clone resulted in the detection of a 38 kD polypeptide, the expected molecular weight of the recombinant Sp0464 polypeptide, by Western blot analysis. See FIG. 159.

### EXAMPLE 18

### Intranasal Immunization of Mice with Recombinant L. lactis Expressing GBS 80 and Subsequent Challenge

[1557] This example describes a method of intranasally immunizing mice using L. lactis that express GBS 80. Intranasal immunization consisted of 3 doses at days 0, 14 and 28, each dose administered in three consecutive days. Each day, groups of 3 CD-1 outbred female mice 6-7 weeks old (Charles River Laboratories, Calco Italy) were immunized intranasally with 10⁹ or 10¹⁰ CFU of the recombinant Lactococcus lactis suspended in 20 μl of PBS. In each immunization scheme negative (wild-type L. lactis) and positive (recombinant GBS80) control groups were used. The immune response of the dams was monitored by using serum samples taken on day 0 and 49. The female mice were bred 2-7 days after the last immunization (at approximately t=36-37), and typically had a gestation period of 21 days. Within 48 hours of birth, the pups were challenged via I.P. with GBS in a dose approximately equal to an amount which would be sufficient to kill 90% of immunized pups (as determined by empirical data gathered from PBS control groups). The GBS challenge dose is preferably administered in 50 ml of THB medium. Preferably, the pup challenge takes place at 56 to 61 days after the first immunization. The challenge inocula were prepared starting from frozen

[symbol]

monitored for 5 days after challenge.

### EXAMPLE 19

### Subcutaneous Immunization of Mice with Recombinant L. lactis Expressing GBS 80 and Subsequent Challenge

[1558] This example describes a method of subcutaneous immunization mice using L. lactis that express GBS 80. Subcutaneous immunization consists of 3 doses at days 0, 14 and 28. Groups of 3 CD-1 outbred female mice 6-7 weeks old (Charles River Laboratories, Calco Italy) were injected subcutaneously with 10⁹ or 10¹⁰ CFU of the recombinant Lactococcus lactis suspended in 100 μl of PBS. In each immunization scheme, negative (wild-type L. lactis) and positive (recombinant GBS80) control groups were used. The immune response of the dams was monitored by using serum samples taken on day 0 and 49. The female mice were bred 2-7 days after the last immunization (at approximately t=36-37), and typically had a gestation period of 21 days. Within 48 hours of birth, the pups were challenged via I.P. with GBS in a dose approximately equal to an amount which would be sufficient to kill 90% of immunized pups (as determined by empirical data gathered from PBS control groups). The GBS challenge dose is preferably administered in 50 ml of THB medium. Preferably, the pup challenge takes place at 56 to 61 days after the first immunization. The challenge inocula were prepared starting from frozen cultures diluted to the appropriate concentration with THB prior to use. Survival of pups was monitored for 5 days after challenge.

### EXAMPLE 20

### Immunization of Mice with GAS AI Polypeptides and Subsequent Intranasal Challenge

[1559] This example describes a method of immunizing mice with GAS AI polypeptides and subsequently intranasally challenging the mice with GAS bacteria. Groups of 10 CD1 female mice aged between 6 and 7 weeks are immunized with a combination of GAS antigens of the invention GAS 15, GAS 16, and GAS 18, (15 μg of each recombinant antigen, derived from M1 strain SF370) or L. lactis expressing the M1 strain SF370 adhesin island, suspended in 100 μl of suitable solution. Each group receives 3 doses at days 0, 21 and 45. Immunization is performed through subcutaneous or intraperitoneal injection for the GAS 15, GAS 16, GAS 18 protein combination. The protein combination is administered with an equal volume of Complete Freund's Adjuvant (CFA) for the first dose and Incomplete Freund's Adjuvant (IFA) for the following two doses. Immunization is performed intranasally for the L. lactis expressing the M1 strain SF370 adhesin island. In each immunization scheme negative and positive control groups are used.

[1560] The negative control group for the mice immunized with the GAS 15, GAS 16, GAS 18 protein combination included mice immunized with PBS. The negative control group for the mice immunized with L. lactis expressing the M1 strain SF370 adhesin island, included mice immunized

[symbol]

cloned adhesin island sequence.

[1561] The positive control groups included mice immunized with purified M1 strain SF370 M protein.

[1562] Immunized mice are then anaesthetized with Zoletil and challenged intranasally with a 25 μL suspension containing 1.2×10⁶ or 1.2×10⁸ CFU of ISS 3348 in THB. Animals are observed daily and checked for survival.

### EXAMPLE 21

### Active Maternal Immunization Assay

[1563] As used herein, an Active Maternal Immunization assay refers to an in vivo protection assay where female mice are immunized with the test antigen composition. The female mice are then bred and their pups are challenged with a lethal dose of GBS. Serum titers of the female mice during the immunization schedule are measured as well as the survival time of the pups after challenge.

### Mouse Immunization

[1564] Specifically, groups of 4 CD-1 outbred female mice 6-8 weeks old (Charles River Laboratories, Calco Italy) are immunized with one or more GBS antigens, (20 μg of each recombinant GBS antigen), suspended in 100 μl of PBS. Each group receives 3 doses at days 0, 21 and 35. Immunization is performed through intra-peritoneal injection of the protein with an equal volume of Complete Freund's Adjuvant (CFA) for the first dose and Incomplete Freund's Adjuvant (CFA) for the following two doses. In each immunization scheme negative and positive control groups are used.

Immune response is monitored by using serum samples taken on day 0 and 49. The sera are analyzed as pools from each group of mice.

### Active Maternal Immunization

[1565] A maternal immunization/neonatal pup challenge model of GBS infection was used to verify the protective efficacy of the antigens in mice. The mouse protection study was adapted from Rodewald et al. (Rodewald et al. J. Infect. Diseases 166, 635 (1992)). In brief, CD-1 female mice (6-8 weeks old) were immunized before breeding, as described above. The mice received 20 μg of protein per dose when immunized with a single antigen and 60 μg of protein per dose (15 μg of each antigen) when immunized with the combination of antigens. Mice were bred 2-7 days after the last immunization. Within 48 h of birth, pups were injected intraperitoneally with 50 μl of GBS culture. Challenge inocula were prepared starting from frozen cultures diluted to the appropriate concentration with THB before use. In preliminary experiments (not shown), the challenge doses per pup for each strain tested were determined to cause 90% lethality. Survival of pups was monitored for 2 days after challenge. Protection was calculated as (percentage

[symbol]

100. Data were evaluated for statistical significance by Fisher's exact test.

[symbol]

[1566] The invention encompasses, but is not limited to, the embodiments enumerated below.

[1567] 1. An immunogenic composition comprising a purified Group B Streptococcus (GBS) adhesin island (AI) polypeptide in oligomeric form.

[1568] 2. The immunogenic composition of embodiment 1 wherein the GBS AI polypeptide is selected from a GBS AI-1.

[1569] 3. The immunogenic composition of embodiment 1 wherein the GBS AI polypeptide is selected from a GBS AI-2.

[1570] 1. An immunogenic composition comprising a purified Group B Streptococcus (GBS) adhesin island (AI) polypeptide in oligomeric form.

[1571] 2. The immunogenic composition of embodiment 1 wherein the GBS AI polypeptide is selected from a GBS AI-1.

[1572] 3. The immunogenic composition of embodiment 1 wherein the GBS AI polypeptide is selected from a GBS AI-2.

[1573] 4. The immunogenic composition of any of embodiments 1-3 wherein the GBS AI polypeptide comprises a sortase substrate motif.

[1574] 5. The immunogenic composition of embodiment 4 wherein the sortase substrate motif is an LPXTG motif.

[1575] 6. The immunogenic composition of embodiment 5 wherein the LPXTG motif is represented by the amino acid sequence XPXTG, wherein the X at amino acid position 1 is an L, an I, or an F and the X at amino acid position 3 is any amino acid residue.

[1576] 7. The immunogenic composition of any one of embodiments 1-3 wherein the GBS AI polypeptide affects the ability of GBS bacteria to adhere to epithelial cells.

[1577] 8. The immunogenic composition of any one of embodiments 1-3 wherein the GBS AI polypeptide affects the ability of GBS bacteria to invade epithelial cells.

[1578] 9. The immunogenic composition of any one of embodiments 1-3 wherein the GBS AI polypeptide affects the ability of GBS bacteria to translocate through an epithelial cell layer.

[1579] 10. The immunogenic composition of any one of embodiments 1-3 wherein the GBS AI polypeptide is capable of associating with an epithelial cell surface.

[1580] 11. The immunogenic composition of embodiment 10 wherein the associating with an epithelial cell surface is binding to the epithelial cell surface.

[1581] 12. The immunogenic composition of any of embodiments 1-3 wherein the GBS AI polypeptide is a full-length GBS AI protein.

[1582] 13. The immunogenic composition of any of embodiments 1-3 wherein the GBS AI polypeptide is a fragment of a full-length GBS AI protein.

[1583] 14. The immunogenic composition of embodiment 13 wherein the fragment comprises at least 7 contiguous amino acid residues of the GBS AI protein.

[symbol]

selected from the group consisting of GBS 80, GBS 104, GBS 52, and fragments thereof.

[1584] 16. The immunogenic composition of embodiment 3 wherein the GBS AI polypeptide is selected from the group consisting of GBS 59, GBS 67, GBS 150, 01521, 01523, 01524, and fragments thereof.

[1585] 17. The immunogenic composition of embodiment 15 wherein the GBS AI polypeptide is GBS 80.

[1586] 18. The immunogenic composition of any of embodiments 1-3 or 15-17 wherein the oligomeric form is a hyperoligomer.

[1587] 19. The immunogenic composition of any of embodiments 1-3, or 15-17 further comprising a Gram positive bacterium antigen not associated with an AI.

[1588] 20. The immunogenic composition of embodiment 19 wherein the antigen is selected from the group consisting of GBS 322 and GBS 276.

[1589] 21. The immunogenic composition of embodiment 20 wherein the antigen is GBS 322.

[1590] 22. An immunogenic composition comprising a purified Gram positive bacteria adhesin island (AI) polypeptide in an oligomeric form.

[1591] 23. The immunogenic composition of embodiment 22 wherein the Gram positive bacteria is of a genus selected from the group consisting of Streptococcus, Enterococcus, Staphylococcus, or Listeria.

[1592] 24. The immunogenic composition of embodiment 23 wherein the Gram positive bacteria is of the genus Streptococcus.

[1593] 25. The immunogenic composition of any of embodiments 22-24 wherein the Gram positive bacteria AI polypeptide comprises a sortase substrate motif.

[1594] 26. The immunogenic composition of embodiment 25 wherein the sortase substrate motif is an LPXTG motif.

[1595] 27. The immunogenic composition of any one of embodiments 22-24 wherein the Gram positive bacteria AI polypeptide affects the ability of Gram positive bacteria to adhere to epithelial cells.

[1596] 28. The immunogenic composition of any one of embodiments 22-24 wherein the Gram positive bacteria AI polypeptide affects the ability of Gram positive bacteria to invade epithelial cells.

[1597] 29. The immunogenic composition of any one of embodiments 22-24 wherein the Gram positive bacteria AI polypeptide affects the ability of Gram positive bacteria to translocate through an epithelial cell layer.

[1598] 30. The immunogenic composition of any one of embodiments 22-24 wherein the Gram positive bacteria AI polypeptide is capable of associating with an epithelial cell surface.

[1599] 31. The immunogenic composition of embodiment 30 wherein the associating with an epithelial cell surface is binding to the epithelial cell surface.

[symbol]

bacteria AI polypeptide is a full-length Gram positive bacteria AI protein.

[1600] 33. The immunogenic composition of any of embodiments 22-24 wherein the Gram positive bacteria AI polypeptide is a fragment of a full-length Gram positive bacteria AI protein.

[1601] 34. The immunogenic composition of embodiment 33 wherein the fragment comprises at least 7 contiguous amino acid residues of the Gram positive bacteria AI protein.

[1602] 35. The immunogenic composition of embodiment 24 wherein the genus Streptococcus bacteria is Group A Streptococcus (GAS) bacteria and the Gram positive bacteria AI polypeptide is a GAS AI polypeptide.

[1603] 36. The immunogenic composition of embodiment 35 wherein the GAS AI polypeptide is selected from a GAS AI-1.

[1604] 37. The immunogenic composition of embodiment 35 wherein the GAS AI polypeptide is selected from a GAS AI-2.

[1605] 38. The immunogenic composition of embodiment 35 wherein the GAS AI polypeptide is selected from a GAS AI-3.

[1606] 39. The immunogenic composition of embodiment 35 wherein the GAS AI polypeptide is selected from a GAS AI-4.

[1607] 40. The immunogenic composition of any of embodiments 35-39 wherein the GAS AI polypeptide comprises a sortase substrate motif.

[1608] 41. The immunogenic composition of embodiment 40 wherein the sortase substrate motif is an LPXTG motif.

[1609] 42. The immunogenic composition of embodiment 41 wherein the LPXTG motif is represented by XXXXG, wherein the X at the first amino acid position is an L, a V, an E, or a Q, wherein the X at the second amino acid position is P if the X at the first amino acid position is an L, the X at the second amino acid position is a V if the X at the first amino acid position is an E or a or the X at the second amino acid position is a V or a P if the X at the first amino acid position is a V, wherein the X at the third amino acid position is any amino acid residue, and wherein the X at the fourth amino acid position is a T if the X at the first amino acid position is a V, an E, or a Q, or the X at the fourth amino acid position is a T, an S, or an A if the X at the first amino acid position is an L.

[1610] 43. The immunogenic composition of any one of embodiments 35-39 wherein the GAS AI polypeptide affects the ability of GAS bacteria to adhere to epithelial cells.

[1611] 44. The immunogenic composition of any one of embodiments 35-39 wherein the GAS AI polypeptide affects the ability of GAS bacteria to invade epithelial cells.

[1612] 45. The immunogenic composition of any one of embodiments 35-39 wherein the GAS AI polypeptide affects the ability of GAS bacteria to translocate through an epithelial cell layer.

[1613] 46. The immunogenic composition of any one of embodiments 35-39 wherein the GAS AI polypeptide is capable of associating with an epithelial cell surface.

[symbol]

epithelial cell surface is binding to the epithelial cell surface.

[1614] 48. The immunogenic composition of any of embodiments 35-39 wherein the GAS AI polypeptide is a full-length GAS AI protein.

[1615] 49. The immunogenic composition of any of embodiments 35-39 wherein the GAS AI polypeptide is a fragment of a full-length GAS AI protein.

[1616] 50. The immunogenic composition of embodiment 49 wherein the fragment comprises at least 7 contiguous amino acid residues of the GAS AI protein.

[1617] 51. The immunogenic composition of embodiment 36 wherein the GAS AI-1 polypeptide is selected from the group consisting of M6_Spy0157, M6_Spy0159, M6_Spy0160, CDC SS 410_fimbrial, ISS3650_fimbrial, DSM2071_fimbrial, and fragments thereof.

[1618] 52. The immunogenic composition of embodiment 37 wherein the GAS AI-2 polypeptide is selected from the group consisting of GAS15, GAS16, GAS18, and fragments thereof.

[1619] 53. The immunogenic composition of embodiment 38 wherein the GAS AI-3 polypeptide is selected from the group consisting of SpyM3_{—}0098, SpyM3_{—}0100, SpyM3_{—}0102, SpyM3_{—}0104, SPs0100, SPs0102, SPs0104, SPs0106, orf78, orf80, orf82, orf84, spyM18-0126, spyM18_{—}0128, spyM18_{—}0130, spyM18_{—}0132, SpyoM01000156, SpyoM01000155, SpyoM01000154, SpyoM01060153, SpyoM01000152, SpyoM01000151, SpyoM01000150, SpyoM01000149, IS S3040_fimbrial, ISS3776_fimbrial, IS S4959_fimbrial, and fragments thereof.

[1620] 53. The immunogenic composition of embodiment 39 wherein the GAS AI-4 polypeptide is selected from the group consisting of 19224134, 19224135, 19224137, 19224139, 19224141, 20010296_fimbrial, 20020069_fimbrial, CDC SS 635_fimbrial, ISS4883_fimbrial, ISS4538_fimbrial, and fragments thereof.

[1621] 54. The immunogenic composition of embodiment 24 wherein the Streptococcus bacteria is Streptococcus pneumoniae and the Gram positive bacteria AI polypeptide is a S. pneumoniae AI polypeptide.

[1622] 55. The immunogenic composition of embodiment 54 wherein the S. pneumoniae AI polypeptide comprises a sortase substrate motif.

[1623] 56. The immunogenic composition of embodiment 55 wherein the sortase substrate motif is an LPXTG motif.

[1624] 57. The immunogenic composition of embodiment 54 wherein the S. pneumoniae AI polypeptide affects the ability of S. pneumoniae to adhere to epithelial cells.

[1625] 58. The immunogenic composition of embodiment 54 wherein the S. pneumoniae AI polypeptide affects the ability of S. pneumoniae to invade epithelial cells.

[1626] 59. The immunogenic composition of embodiment 54 wherein the S. pneumoniae AI polypeptide affects the ability of S. pneumoniae to translocate through an epithelial cell layer.

[1627] 60. The immunogenic composition of embodiment 54 wherein the S. pneumoniae AI polypeptide is capable of associating with an epithelial cell surface.

[symbol]

epithelial cell surface is binding to the epithelial cell surface.

[1628] 62. The immunogenic composition of embodiment 54 wherein the S. pneumoniae AI polypeptide is a full-length S. pneumoniae AI protein.

[1629] 63. The immunogenic composition of embodiment 54 wherein the S. pneumoniae AI polypeptide is a fragment of a full-length S. pneumoniae AI protein.

[1630] 64. The immunogenic composition of embodiment 63 wherein the fragment comprises at least 7 contiguous amino acid residues of the S. pneumoniae AI protein.

[1631] 65. The immunogenic composition of embodiment 54 wherein the S. pneumoniae AI polypeptide is selected from the group consisting of SP0462, SP0463, SP0464, orf3_{—}670, orf4_{—}670, orf5_{—}670, ORF3_{—}14CSR, ORF4_{—}14CSR, ORF5_{—}14CSR, ORF3_{—}19AH, ORF4_{—}19AH, ORF5_{—}19AH, ORF3_{—}19FTW, ORF4_{—}19FTW, ORF5_{—}19FTW, ORF3_{—}23FP, ORF4_{—}23FP, ORF5_{—}23FP, ORF3_{—}23FTW, ORF4_{—}23FTW, ORF523FTW, ORF3_{—}6BF, ORF4_{—}6BF, ORF5_{—}6BF, ORF3_{—}6BSP, ORF4_{—}6BSP, ORF5_{—}6BSP, ORF3_{—}9VSP, ORF4_{—}9VSP, ORF5_{—}9VSP, and fragments thereof.

[1632] 66. The immunogenic composition of any one of embodiments 22-24, 35-39, 51-54, or 65 wherein the oligomeric form is a hyperoligomer.

[1633] 67. The immunogenic composition of any one of embodiments 22-24, 35-39, 51-54, or 65 further comprising a Gram positive bacteria antigen not associated with an AI.

[1634] 68. The immunogenic composition of embodiment 67 wherein the antigen is selected from the group consisting of GBS 322 and GBS 276.

[1635] 69. An immunogenic composition comprising a first and a second Group B Streptococcus (GBS) adhesin island (AI) polypeptide.

[1636] 70. The immunogenic composition of embodiment 69 wherein a full-length polynucleotide sequence encoding for the first GBS AI polypeptide is not present in a GBS bacteria genome comprising a polynucleotide sequence encoding for the second GBS AI polypeptide.

[1637] 71. The immunogenic composition of embodiment 69 wherein polynucleotides encoding the first and the second GBS AI polypeptide are each present in genomes of more than one GBS serotype and strain isolate.

[1638] 72. The immunogenic composition of embodiment 69 wherein the first GBS AI polypeptide is encoded by a GBS AI-1.

[1639] 73. The immunogenic composition of embodiment 69 wherein the first GBS AI polypeptide is encoded by a GBS AI-2.

[1640] 74. The immunogenic composition of embodiment 72 wherein the second GBS AI polypeptide is encoded by a GBS AI-2.

[1641] 75. The immunogenic composition of embodiment 73 wherein the second GBS AI polypeptide is encoded by a GBS AI-2.

[1642] 76. The immunogenic composition of embodiment 72 wherein the second GBS AI polypeptide is encoded by a GBS AI-1.

[symbol]

polypeptide is encoded by a GBS AI-1.

[1643] 78. The immunogenic composition of embodiment 72 wherein the first GBS AI polypeptide is selected from the group consisting of GBS 80, GBS 104, GBS 52, and fragments thereof.

[1644] 79. The immunogenic composition of embodiment 73 wherein the first GBS AI polypeptide is selected from the group consisting of GBS 59, GBS 67, GBS 150, 01521, 01523, 01524, and fragments thereof.

[1645] 80. The immunogenic composition of embodiment 74 or 75 wherein the second GBS AI polypeptide is selected from the group consisting of GBS 59, GBS 67, GBS 150, 01521, 01523, 01524, and fragments thereof, and wherein the first and the second GBS AI polypeptide are not the same polypeptide.

[1646] 81. The immunogenic composition of embodiment 76 or 77 wherein the second GBS AI polypeptide is selected from the group consisting of GBS 80, GBS 104, GBS 52, and fragments thereof, and wherein the first and the second GBS AI polypeptide are not the same polypeptide.

[1647] 82. The immunogenic composition of any one of embodiments 69-77 wherein the first GBS AI polypeptide comprises a sortase substrate motif.

[1648] 83. The immunogenic composition of embodiment 82 wherein the sortase substrate motif is an LPXTG motif.

[1649] 84. The immunogenic composition of embodiment 83 wherein the LPXTG motif is represented by the sequence XPXTG, wherein the X at amino acid position 1 is an L, an I, or an F and the X at amino acid position 3 is any amino acid residue.

[1650] 85. The immunogenic composition of any one of embodiments 69-77 wherein the first GBS AI polypeptide affects the ability of GBS bacteria to adhere to epithelial cells.

[1651] 86. The immunogenic composition of any one of embodiments 69-77 wherein the first GBS AI polypeptide affects the ability of GBS bacteria to invade epithelial cells.

[1652] 87. The immunogenic composition of any one of embodiments 69-77 wherein the first GBS AI polypeptide affects the ability of GBS bacteria to translocate through an epithelial cell layer.

[1653] 88. The immunogenic composition of any one of embodiments 69-77 wherein the first GBS AI polypeptide is capable of associating with an epithelial cell surface.

[1654] 89. The immunogenic composition of embodiment 88 wherein the associating with an epithelial cell surface is binding to the epithelial cell surface.

[1655] 90. The immunogenic composition of any of embodiments 69-77 wherein the first GBS AI polypeptide is a full-length GBS AI protein.

[1656] 91. The immunogenic composition of any of embodiments 69-77 wherein the first GBS AI polypeptide is a fragment of a full-length GBS AI protein.

[1657] 92. The immunogenic composition of embodiment 91 wherein the fragment comprises at least 7 contiguous amino acid residues of the first GBS AI protein.

[symbol]

AI polypeptide is in oligomeric form.

[1658] 94. The immunogenic composition of any one of embodiments 69-77 wherein the second GBS AI polypeptide is in oligomeric form.

[1659] 95. The immunogenic composition of any one of embodiments 69-79 wherein the first and the second GBS AI polypeptide are associated in a single oligomeric form.

[1660] 96. The immunogenic composition of embodiment 95 wherein the first and the second GBS AI polypeptides are chemically associated.

[1661] 97. The immunogenic composition of embodiment 95 wherein the first and the second GBS AI polypeptides are physically associated.

[1662] 98. The immunogenic composition of embodiment 93 wherein the oligomeric form is a hyperoligomer.

[1663] 99. The immunogenic composition of embodiment 94 wherein the oligomeric form is a hyperoligomer.

[1664] 100. The immunogenic composition of embodiment 76 wherein the first GBS AI polypeptide is GBS 80 and the second GBS AI polypeptide is GBS 104.

[1665] 101. The immunogenic composition of embodiment 74 wherein the first GBS AI polypeptide is GBS 80 and the second GBS AI polypeptide is GBS 67.

[1666] 102. The immunogenic composition of any one of embodiments 69-79, 100, or 101 further comprising a GBS polypeptide not associated with an AI.

[1667] 103. The immunogenic composition of embodiment 102 wherein the GBS polypeptide not associated with an AI is selected from the group consisting of GBS 322 and GBS 276.

[1668] 104. The immunogenic composition of embodiment 103 wherein the GBS polypeptide not associated with an AI is GBS 322.

[1669] 105. An immunogenic composition comprising a first and a second Gram positive bacteria adhesin island (AI) polypeptide.

[1670] 106. The immunogenic composition of embodiment 105 wherein a full length polynucleotide sequence encoding for the first Gram positive bacteria AI polypeptide is not present in a genome of a Gram positive bacteria comprising a full length polynucleotide sequence encoding for the second Gram positive bacteria AI polypeptide.

[1671] 107. The immunogenic composition of embodiment 105 wherein polynucleotides encoding the first and the second Gram positive bacteria AI polypeptide are each present in genomes of more than one Gram positive bacteria serotype and strain isolate.

[1672] 108. The immunogenic composition of embodiment 105 wherein the first and the second Gram positive bacteria AI polypeptides are of different Gram positive bacteria species.

[1673] 109. The immunogenic composition of embodiment 105 wherein the first and the second Gram positive bacteria AI polypeptides are of the same Gram positive bacteria species.

[symbol]

Gram positive bacteria AI polypeptides are from different AI subtypes.

[1674] 111. The immunogenic composition of embodiment 105 wherein the first and the second Gram positive bacteria AI polypeptides are from the same AI subtype.

[1675] 112. The immunogenic composition of embodiment 105 wherein the first Gram positive bacteria AI polypeptide has detectable surface exposure on a first Gram positive bacteria strain or serotype but not a second Gram positive bacteria strain or subtype and the second Gram positive bacteria AI polypeptide has detectable surface exposure on the second Gram positive bacteria strain or serotype but not the first Gram positive bacteria strain or serotype.

[1676] 113. The immunogenic composition of embodiment 105 wherein the Gram positive bacteria is S. pneumonaie, S. mutans, E. faecalis, E. faecium, C. difficile, L. monocytogenes, or C. diphtheriae.

[1677] 114. The immunogenic composition of any of embodiments 105-113 wherein the first and the second Gram positive bacteria AI polypeptides comprise a sortase substrate motif.

[1678] 115. The immunogenic composition of embodiment 114 wherein the sortase substrate motif is an LPXTG motif.

[1679] 116. The immunogenic composition of embodiment 115 wherein the LPXTG motif is represented by XXXXG, wherein the X at amino acid position 1 is an L, a V, an E, an I, an F, or a Q, wherein X at amino acid position 2 is a P if X at amino acid position 1 is an L, an I, or an F, wherein X at amino acid position 2 is a V if X at amino acid position 1 is a E or a Q, wherein X at amino acid position 2 is a V or a P if X at amino acid position 1 is a V, wherein X at amino acid position 3 is any amino acid residue, wherein X at amino acid position 4 is a T if X at amino acid position 1 is a V, E, I, F, or Q, and wherein X at amino acid position 4 is a T, S, or A if X at amino acid position 1 is an L.

[1680] 117. The immunogenic composition of embodiment 105 wherein the first Gram positive bacteria AI polypeptide is a first Group A Streptococcus (GAS) AI polypeptide.

[1681] 118. The immunogenic composition of embodiment 117 wherein the first GAS AI polypeptide comprises a sortase substrate motif.

[1682] 119. The immunogenic composition of embodiment 118 wherein the sortase substrate motif is an LPXTG motif.

[1683] 120. The immunogenic composition of embodiment 119 wherein the LPXTG motif is represented by XXXXG, wherein the X at the first amino acid position is an L, a V, an E, or a Q, wherein the X at the second amino acid position is P if the X at the first amino acid position is an L, the X at the second amino acid position is a V if the X at the first amino acid position is an E or a Q, or the X at the second amino acid position is a V or a P if the X at the first amino acid position is a V, wherein the X at the third amino acid position is any amino acid residue, and wherein the X at the fourth amino acid position is a T if the X at the first amino acid position is a V, an E, or a Q, or the X at the fourth amino acid position is a T, an S, or an A if the X at the first amino acid position is an L.

[1684] 121. The immunogenic composition of embodiment 117 wherein the first GAS AI polypeptide affects the ability of GAS bacteria to adhere to epithelial cells.

[symbol]

polypeptide affects the ability of GAS bacteria to invade epithelial cells.

[1685] 123. The immunogenic composition of embodiment 117 wherein the first GAS AI polypeptide affects the ability of GAS bacteria to translocate through an epithelial cell layer.

[1686] 124. The immunogenic composition of embodiment 117 wherein the first GAS AI polypeptide is capable of associating with an epithelial cell surface.

[1687] 125. The immunogenic composition of embodiment 117 wherein the associating with an epithelial cell surface is binding to the epithelial cell surface.

[1688] 126. The immunogenic composition of embodiment 117 wherein the first GAS AI polypeptide is a full-length GAS AI protein.

[1689] 127. The immunogenic composition of embodiment 117 wherein the first GAS AI polypeptide is a fragment of a full-length GAS AI protein.

[1690] 128. The immunogenic composition of embodiment 127 wherein the fragment comprises at least 7 contiguous amino acid residues of the GAS AI protein.

[1691] 129. The immunogenic composition of embodiment 117 wherein the first GAS AI polypeptide is a first GAS AI-1 polypeptide.

[1692] 130. The immunogenic composition of embodiment 117 wherein the first GAS AI polypeptide is a first GAS AI-2 polypeptide.

[1693] 131. The immunogenic composition of embodiment 117 wherein the first GAS AI polypeptide is a first GAS AI-3 polypeptide.

[1694] 132. The immunogenic composition of embodiment 117 wherein the first GAS AI polypeptide is a first GAS AI-4 polypeptide.

[1695] 133. The immunogenic composition of any one of embodiments 117 or 129-132 wherein the second Gram positive bacteria AI polypeptide is a second GAS AI polypeptide.

[1696] 134. The immunogenic composition of embodiment 133 wherein the second GAS AI polypeptide is a second GAS AI-1 polypeptide.

[1697] 135. The immunogenic composition of embodiment 133 wherein the second GAS AI polypeptide is a second GAS AI-2 polypeptide.

[1698] 136. The immunogenic composition of embodiment 133 wherein the second GAS AI polypeptide is a second GAS AI-3 polypeptide.

[1699] 137. The immunogenic composition of embodiment 133 wherein the second GAS AI polypeptide is a second GAS AI-4 polypeptide.

[1700] 138. The immunogenic composition of embodiment 129 wherein the first GAS AI-1 polypeptide is selected from the group consisting of M6_Spy0157, M6_Spy0159, M6_Spy0160, CDC SS 410_fimbrial, ISS3650_fimbrial, DSM2071_fimbrial, and fragments thereof.

[1701] 139. The immunogenic composition of embodiment 130 wherein the first GAS AI-2 polypeptide is selected from the group consisting of GAS15, GAS16, GAS18, and fragments thereof.

[symbol]

polypeptide is selected from the group consisting of SpyM3_{—}0098, SpyM3_{—}0100, SpyM3_{—}0102, SpyM3_{—}0104, SPs0100, SPs0102, SPs0104, SPs0106, orf78, orf80, orf82, orf84, spyM18_{—}0126, spyM18_{—}0128, spyM18_{—}0130, spyM18_{—}0132, SpyoM01000156, SpyoM01000155, SpyoM01000154, SpyoM01000153, SpyoM01000152, SpyoM01000151, SpyoM01000150, SpyoM01000149, ISS3040_fimbrial, ISS3776_fimbrial, IS S4959_fimbrial, and fragments thereof.

[1702] 141. The immunogenic composition of embodiment 132 wherein the first GAS AI-4 polypeptide is selected from the group consisting of 19224134, 19224135, 19224137, 19224139, 19224141, 20010296_fimbrial, 20020069_fimbrial, CDC SS 635_fimbrial, ISS4883_fimbrial, ISS4538_fimbrial, and fragments thereof.

[1703] 142. The immunogenic composition of embodiment 134 wherein the second GAS AI-1 polypeptide is selected from the group consisting of M6_Spy0157, M6_Spy0159, M6_Spy0160, CDC SS 410_fimbrial, ISS3650_fimbrial, DSM2071_fimbrial, and fragments thereof.

[1704] 143. The immunogenic composition of embodiment 135 wherein the second GAS AI-2 polypeptide is selected from the group consisting of GAS15, GAS16, GAS18, and fragments thereof.

[1705] 144. The immunogenic composition of embodiment 136 wherein the second GAS AI-3 polypeptide is selected from the group consisting of SpyM3_{—}0098, SpyM3_{—}0100, SpyM3_{—}0102, SpyM3_{—}0104, SPs0100, SPs0102, SPs0104, SPs0106, orf78, orf80, orf82, orf84, spyM18_{—}0126, spyM18_{—}128, spyM18_{—}0130, spyM18_{—}0132, SpyoM01000156, SpyoM01000155, SpyoM01000154, SpyoM01000153, SpyoM01000152, SpyoM01000151, SpyoM01000150, SpyoM01000149, ISS3040_fimbrial, ISS3776_fimbrial, ISS4959_fimbrial, and fragments thereof.

[1706] 145. The immunogenic composition of embodiment 137 wherein the second GAS AI-4 polypeptide is selected from the group consisting of 19224134, 19224135, 19224137, 19224139, 19224141, 20010296_fimbrial, 20020069_fimbrial, CDC SS 635_fimbrial, ISS4883_fimbrial, ISS4538_fimbrial, and fragments thereof.

[1707] 146. The immunogenic composition of any one of embodiments 117-132 or 138-141 wherein the second Gram positive bacteria A polypeptide is a Group B Streptococcus (GBS) A polypeptide.

[1708] 147. The immunogenic composition of embodiment 146 wherein the GBS AI polypeptide comprises a sortase substrate motif.

[1709] 148. The immunogenic composition of embodiment 147 wherein the sortase substrate motif is an LPXTG motif.

[1710] 149. The immunogenic composition of embodiment 148 wherein the LPXTG motif is represented by the amino acid sequence XPXTG, wherein the X at amino acid position 1 is an L, an I, or an F and the X at amino acid position 3 is any amino acid residue.

[1711] 150. The immunogenic composition of embodiment 146 wherein the GBS AI polypeptide affects the ability of GBS bacteria to adhere to epithelial cells.

[1712] 151. The immunogenic composition of embodiment 146 wherein the GBS AI polypeptide affects the ability of GBS bacteria to invade epithelial cells.

[symbol]

affects the ability of GBS bacteria to translocate through an epithelial cell layer.

[1713] 153. The immunogenic composition of embodiment 146 wherein the GBS AI polypeptide is capable of associating with an epithelial cell surface.

[1714] 154. The immunogenic composition of embodiment 146 wherein the associating with an epithelial cell surface is binding to the epithelial cell surface.

[1715] 155. The immunogenic composition of embodiment 146 wherein the GBS AI polypeptide is a full-length GBS AI protein.

[1716] 156. The immunogenic composition of embodiment 146 wherein the GBS AI polypeptide is a fragment of a full-length GBS AI protein.

[1717] 157. The immunogenic composition of embodiment 156 wherein the fragment comprises at least 7 contiguous amino acid residues of the GBS AI protein.

[1718] 158. The immunogenic composition of embodiment 146 wherein the GBS AI polypeptide is a GBS AI-1 polypeptide.

[1719] 159. The immunogenic composition of embodiment 146 wherein the GBS AI polypeptide is a GBS AI-2 polypeptide.

[1720] 160. The immunogenic composition of embodiment 158 wherein the GBS AI-1 polypeptide is selected from the group consisting of GBS 80, GBS 104, GBS 52, and fragments thereof.

[1721] 161. The immunogenic composition of embodiment 159 wherein the GBS AI-2 polypeptide is selected from the group consisting of GBS 59, GBS 67, GBS 150, 01521, 01523, 01524, and fragments thereof.

[1722] 162. The immunogenic composition of any one of embodiments 117-132 or 138-141 wherein the second Gram positive bacteria AI polypeptide is a Streptococcus pneumoniae AI polypeptide.

[1723] 163. The immunogenic composition of embodiment 162 wherein the S. pneumoniae AI polypeptide comprises a sortase substrate motif.

[1724] 164. The immunogenic composition of embodiment 163 wherein the sortase substrate motif is an LPXTG motif.

[1725] 165. The immunogenic composition of embodiment 162 wherein the S. pneumoniae AI polypeptide affects the ability of S. pneumoniae to adhere to epithelial cells.

[1726] 166. The immunogenic composition of embodiment 162 S. pneumoniae AI polypeptide affects the ability of S. pneumoniae to invade epithelial cells.

[1727] 167. The immunogenic composition of embodiment 162 wherein the S. pneumoniae AI polypeptide affects the ability of S. pneumoniae to translocate through an epithelial cell layer.

[1728] 168. The immunogenic composition of embodiment 162 wherein the S. pneumoniae AI polypeptide is capable of associating with an epithelial cell surface.

[1729] 169. The immunogenic composition of embodiment 168 wherein the associating with an epithelial cell surface is binding to the epithelial cell surface.

[symbol]

polypeptide is a full-length S. pneumoniae AI protein.

[1730] 171. The immunogenic composition of embodiment 162 wherein the S. pneumoniae AI polypeptide is a fragment of a full-length S. pneumoniae AI protein.

[1731] 172. The immunogenic composition of embodiment 162 wherein the fragment comprises at least 7 contiguous amino acid residues of the S. pneumoniae AI protein.

[1732] 173. The immunogenic composition of embodiment 162 wherein the S. pneumoniae AI polypeptide is selected from the group consisting of SP0462, SP0463, SP0464, orf3_{—}670, orf4_{—}670, orf5_{—}670, ORF3_{—}14CSR, ORF4_{—}14CSR, ORF5_{—}14CSR, ORF3_{—}19AH, ORF4_{—}19AH, ORF5_{—}19AH, ORF3_{—}19FTW, ORF4_{—}19FTW, ORF5_{—}19FTW, ORF3_{—}23FP, ORF4_{—}23FP, ORF5_{—}23FP, ORF3_{—}23FTW, ORF4_{—}23FTW, ORF5_{—}23FTW, ORF3_{—}6BF, ORF4_{—}6BF, ORF5_{—}6BF, ORF3_{—}6BSP, ORF4_{—}6BSP, ORF5_{—}6BSP, ORF3_{—}9VSP, ORF4_{—}9VSP, ORF5_{—}9VSP, and fragments thereof.

[1733] 174. The immunogenic composition of any one of embodiments 105-117 wherein the first Gram positive bacteria AI polypeptide is in oligomeric form.

[1734] 175. The immunogenic composition of embodiment 174 wherein the oligomeric form is a hyperoligomer.

[1735] 176. The immunogenic composition of embodiment 174 wherein the second Gram positive bacteria AI polypeptide is in oligomeric form.

[1736] 177. The immunogenic composition of embodiment 176 wherein the oligomeric form is a hyperoligomer.

[1737] 178. The immunogenic composition of embodiment 176 wherein the first and the second Gram positive bacteria AI polypeptide are associated in a single oligomeric form.

[1738] 179. The immunogenic composition of embodiment 178 wherein the first and the second Gram positive bacteria AI polypeptide are chemically associated.

[1739] 180. The immunogenic composition of embodiment 178 wherein the first and the second Gram positive bacteria AI polypeptide are physically associated.

[1740] 181. The immunogenic composition of any one of embodiments 105-117 further comprising a Gram positive bacteria polypeptide not associated with an AI.

[1741] 182. The immunogenic composition of embodiment 181 wherein the Gram positive bacteria polypeptide not associated with an AI is selected from the group consisting of GBS 322 and GBS 276.

[1742] 183. The immunogenic composition of embodiment 182 wherein the Gram positive bacteria polypeptide not associated with an AI is GBS 322.

[1743] 184. A modified Gram positive bacterium adapted to produce increased levels of AI surface protein.

[1744] 185. The modified Gram positive bacterium of embodiment 184 wherein the AI surface protein is in oligomeric form.

[1745] 186. The modified Gram positive bacterium of embodiment 185 wherein the oligomeric form is a hyperoligomer.

[symbol]

Group B Streptococcus bacterium.

[1746] 188. The modified Gram positive bacterium of any one of embodiments 184-186 which is a Group A Streptococcus bacterium.

[1747] 189. The modified Gram positive bacterium of any one of embodiments 184-186 which is a non-pathogenic Gram positive bacterium.

[1748] 190. The modified Gram positive bacterium of embodiment 189 wherein the non-pathogenic Gram positive bacterium is Streptococcus gordonii.

[1749] 191. The modified Gram positive bacterium of embodiment 189 wherein the non-pathogenic Gram positive bacterium is Lactococcus lactis.

[1750] 192. The modified Gram positive bacterium of any one of embodiments 184-186 which has been inactivated and wherein the AI surface protein is exposed on the surface of the Gram positive bacterium.

[1751] 193. The modified Gram positive bacterium of any one of embodiments 184-186 which has been attenuated and wherein the AI surface protein is exposed on the surface of the Gram positive bacterium.

[1752] 194. The modified GBS bacterium of embodiment 187 which has been inactivated and wherein the AI surface protein is exposed on the surface of the GBS bacterium.

[1753] 195. The modified GBS bacterium of embodiment 187 which has been attenuated and wherein the AI surface protein is exposed on the surface of the GBS bacterium.

[1754] 196. The modified GAS bacterium of embodiment 188 which has been inactivated and wherein the AI surface protein is exposed on the surface of the GAS bacterium.

[1755] 197. The modified GAS bacterium of embodiment 188 which has been attenuated and wherein the AI surface protein is exposed on the surface of the GAS bacterium.

[1756] 198. The modified non-pathogenic bacterium of embodiment 189 which has been inactivated and wherein the AI surface protein is exposed on the surface of the non-pathogenic Gram positive bacterium.

[1757] 199. The modified non-pathogenic bacterium of embodiment 189 which has been attenuated and wherein the AI surface protein is exposed on the surface of the non-pathogenic Gram positive bacterium.

[1758] 200. A method for manufacturing an oligomeric adhesin island (AI) surface antigen comprising:

[1759] culturing a Gram positive bacterium that expresses an oligomeric AI surface antigen and

[1760] isolating the expressed oligomeric AI surface antigen.

[1761] 201. The method of embodiment 200 wherein the step of isolating is performed by collecting said oligomeric AI surface antigen from Gram positive bacterium secretions in the Gram positive bacterium culture.

[1762] 202. The method of embodiment 200 further comprising a step of purifying.

[symbol]

from the Gram positive bacterium cell surface.

[1763] 204. The method of embodiment 200 wherein the Gram positive bacterium is adapted for increased AI protein expression.

[1764] 205. The method of any one of embodiments 200-204 wherein the Gram positive bacterium is a Group A Streptococcus bacterium.

[1765] 206. The method of any one of embodiments 200-204 wherein the Gram positive bacterium is a Group B Streptococcus bacterium.

[1766] 207. The method of any one of embodiments 200-204 wherein the oligomeric AI surface antigen is in hyperoligomeric form.

[1767] 208. The method of embodiment 200 wherein the Gram positive bacterium expresses the oligomeric AI surface antigen recombinantly.

[1768] 209. The method of embodiment 208 wherein the Gram positive bacterium further manipulated expresses at least 1 AI sortase.

[1769] 210. The modified Gram positive bacterium of any one of embodiments 184-186 which is a S. pneumoniae bacterium.

[1770] 211. The method of any one of embodiments 200-204 wherein the Gram positive bacterium is S. pneumoniae.

1. An immunogenic composition comprising a purified Group B Streptococcus (GBS) adhesin island (AI) polypeptide in oligomeric form.

2. The immunogenic composition of claim 1, wherein:
(1) the GBS AI polypeptide is selected from a GBS AI-I;
(2) the GBS AI polypeptide is selected from a GBS AI-2;
(3) the GBS AI polypeptide is selected from the group consisting of GBS 80, GBS 104, GBS 52, and fragments thereof;
(4) the GBS AI polypeptide is selected from the group consisting of GBS 59, GBS 67, GBS 150, 01521, 01523, 01524, and fragments thereof;
(5) the GBS AI polypeptide is GBS80; and
(6) the oligomeric form is a hyperoligomer.

3-7. (canceled)

8. An immunogenic composition comprising a purified Gram positive bacteria adhesin island (AI) polypeptide.

9. The immunogenic composition of claim 8 wherein:
(1) the Gram positive bacteria is of a genus selected from the group consisting of Streptococcus, Enterococcus, Staphylococcus, Clostridium, Corynebacterium, or Listeria;
(2) the Gram positive bacteria is of the genus Streptococcus;
(3) Gram positive bacteria is of the genus Streptococcus bacteria is Group A Streptococcus (GAS) bacteria and the Gram positive bacteria AI polypeptide is a GAS AI polypeptide;
(4) the AI polypeptide is a GAS AI polypeptide selected from a GAS AI-I;
(5) the AI polypeptide is a GAS AI polypeptide is selected from a GAS AI-2.
(6) the AI polypeptide is a GAS AI polypeptide is selected from a GAS AI-3;
(7) the AI polypeptide is a GAS AI polypeptide is selected from a GAS AI-4; or
(8) the AI polypeptide is a hyperoligomer.

10-16. (canceled)

17. The immunogenic composition of claim 8 which comprises a first and a second Group B Streptococcus (GBS) adhesin island (AI) polypeptide.

18. The immunogenic composition of claim 17 wherein:
(1) the first GBS AI polypeptide is encoded by a GBS AI-1;
(2) the second GBS AI polypeptide is encoded by a GBS AI-2;
(3) the first GBS AI polypeptide is selected from the group consisting of GBS 80, GBS 104, GBS 52, and fragments thereof;
(4) the second GBS AI polypeptide is selected from the group consisting of GBS 59, GBS 67, GBS 150, 01521, 01523, 01524, and fragments thereof, and wherein the first and the second GBS AI polypeptide are not the same polypeptide; and
(5) wherein the first GBS AI polypeptide is GBS80 and the second GBS AI polypeptide is GBS67.

19-22. (canceled)

23. The immunogenic composition of claim 8 further comprising a second Gram positive bacteria adhesin island (AI) polypeptide.

24. The immunogenic composition of claim 23 wherein:
(1) the Gram positive bacteria is Streptococcus, Enterococcus, Staphylococcus, Clostridium, Corynebacterium, or Listeria;
(2) the first Gram positive bacteria AI polypeptide is a first Group A Streptococcus (GAS) AI polypeptide;
(3) the first GAS AI polypeptide is a first GAS AI polypeptide;
(4) the first GAS AI polypeptide is a first GAS AI-2 polypeptide;
(5) the first GAS AI polypeptide is a first GAS AI-3 polypeptide;
(6) the first GAS AI polypeptide is a first GAS AI-4 polypeptide;
(7) the second Gram positive bacteria AI polypeptide is a second GAS AI polypeptide;
(8) the second GAS AI polypeptide is a second GAS AI-I polypeptide;
(9) the second GAS AI polypeptide is a second GAS AI-2 polypeptide;
(10) the second GAS AI polypeptide is a second GAS AI-3 polypeptide; or.
(11) the second GAS AI polypeptide is a second GAS AI-4 polypeptide.

25-34. (canceled)

35. A modified Gram positive bacterium adapted to produce increased levels of AI surface protein.

36. The modified Gram positive bacterium of claim 35 wherein:
(1) the AI surface protein is in oligomeric form;
(2) the AI surface protein is in oligomeric form and the oligomeric form is a hyperoligomer;
(3) the modified Gram positive bacterium is a nonpathogenic Gram positive bacterium; or
(4) wherein the modified Gram positive bacterium is Lactococcus lactis.

37-39. (canceled)

40. A method for manufacturing an oligomeric adhesin island (AI) surface antigen comprising: culturing a Gram positive bacterium that expresses an oligomeric AI surface antigen and isolating the expressed oligomeric AI surface antigen.

The application's sequence listing, which the Patent Office published only in electronic form, follows.

SEQUENCE LISTING (548 sequences)

SEQ ID NO: 1 - DNA, 1662 bp, Streptococcus agalactiae
atgaaattatcgaagaagttattgttttcggctgctgttttaacaatggtggcggggtcaactgttgaaccagtagctcagtttgcgactggaatgagtattgtaagagctgcagaagtgtcacaagaacgcccagcgaaaacaacagtaaatatctataaattacaagctgatagttataaatcggaaattacttctaatggtggtatcgagaataaagacggcgaagtaatatctaactatgctaaacttggtgacaatgtaaaaggtttgcaaggtgtacagtttaaacgttataaagtcaagacggatatttctgttgatgaattgaaaaaattgacaacagttgaagcagcagatgcaaaagttggaacgattcttgaagaaggtgtcagtctacctcaaaaaactaatgctcaaggtttggtcgtcgatgctctggattcaaaaagtaatgtgagatacttgtatgtagaagatttaaagaattcaccttcaaacattaccaaagcttatgctgtaccgtttgtgttggaattaccagttgctaactctacaggtacaggtttcctttctgaaattaatatttaccctaaaaacgttgtaactgatgaaccaaaaacagataaagatgttaaaaaattaggtcaggacgatgcaggttatacgattggtgaagaattcaaatggttcttgaaatctacaatccctgccaatttaggtgactatgaaaaatttgaaattactgataaatttgcagatggcttgacttataaatctgttggaaaaatcaagattggttcgaaaacactgaatagagatgagcactacactattgatgaaccaacagttgataaccaaaatacattaaaaattacgtttaaaccagagaaatttaaagaaattgctgagctacttaaaggaatgacccttgttaaaaatcaagatgctcttgataaagctactgcaaatacagatgatgcggcatttttggaaattccagttgcatcaactattaatgaaaaagcagttttaggaaaagcaattgaaaatacttttgaacttcaatatgaccatactcctgataaagctgacaatccaaaaccatctaatcctccaagaaaaccagaagttcatactggtgggaaacgatttgtaaagaaagactcaacagaaacacaaacactaggtggtgctgagtttgatttgttggcttctgatgggacagcagtaaaatggacagatgctcttattaaagcgaatactaataaaaactatattgctggagaagctgttactgggcaaccaatcaaattgaaatcacatacagacggtacgtttgagattaaaggtttggcttatgcagttgatgcgaatgcagagggtacagcagtaacttacaaattaaaagaaacaaaagcaccagaaggttatgtaatccctgataaagaaatcgagtttacagtatcacaaacatcttataatacaaaaccaactgacatcacggttgatagtgctgatgcaacacctgatacaattaaaaacaacaaacgtccttcaatccctaatactggtggtattggtacggctatctttgtcgctatcggtgctgcggtgatggcttttgctgttaaggggatgaagcgtcgtacaaaagataac

SEQ ID NO: 2 - protein, 554 aa, Streptococcus agalactiae
MKLSKKLLFSAAVLTMVAGSTVEPVAQFATGMSIVRAAEVSQERPAKTTVNIYKLQADSYKSEITSNGGIENKDGEVISNYAKLGDNVKGLQGVQFKRYKVKTDISVDELKKLTTVEAADAKVGTILEEGVSLPQKTNAQGLVVDALDSKSNVRYLYVEDLKNSPSNITKAYAVPFVLELPVANSTGTGFLSEINIYPKNVVTDEPKTDKDVKKLGQDDAGYTIGEEFKWFLKSTIPANLGDYEKFEITDKFADGLTYKSVGKIKIGSKTLNRDEHYTIDEPTVDNQNTLKITFKPEKFKEIAELLKGMTLVKNQDALDKATANTDDAAFLEIPVASTINEKAVLGKAIENTFELQYDHTPDKADNPKPSNPPRKPEVHTGGKRFVKKDSTETQTLGGAEFDLLASDGTAVKWTDALIKANTNKNYIAGEAVTGQPIKLKSHTDGTFEIKGLAYAVDANAEGTAVTYKLKETKAPEGYVIPDKEIEFTVSQTSYNTKPTDITVDSADATPDTIKNNKRPSIPNTGGIGTAIFVAIGAAVMAFAVKGMKRRTKDN

SEQ ID NO: 3 - protein, 517 aa, Streptococcus agalactiae
AEVSQERPAKTTVNIYKLQADSYKSEITSNGGIENKDGEVISNYAKLGDNVKGLQGVQFKRYKVKTDISVDELKKLTTVEAADAKVGTILEEGVSLPQKTNAQGLVVDALDSKSNVRYLYVEDLKNSPSNITKAYAVPFVLELPVANSTGTGFLSEINIYPKNVVTDEPKTDKDVKKLGQDDAGYTIGEEFKWFLKSTIPANLGDYEKFEITDKFADGLTYKSVGKIKIGSKTLNRDEHYTIDEPTVDNQNTLKITFKPEKFKEIAELLKGMTLVKNQDALDKATANTDDAAFLEIPVASTINEKAVLGKAIENTFELQYDHTPDKADNPKPSNPPRKPEVHTGGKRFVKKDSTETQTLGGAEFDLLASDGTAVKWTDALIKANTNKNYIAGEAVTGQPIKLKSHTDGTFEIKGLAYAVDANAEGTAVTYKLKETKAPEGYVIPDKEIEFTVSQTSYNTKPTDITVDSADATPDTIKNNKRPSIPNTGGIGTAIFVAIGAAVMAFAVKGMKRRTKDN

SEQ ID NO: 4 - protein, 525 aa, Streptococcus agalactiae
MKLSKKLLFSAAVLTMVAGSTVEPVAQFATGMSIVRAAEVSQERPAKTTVNIYKLQADSYKSEITSNGGIENKDGEVISNYAKLGDNVKGLQGVQFKRYKVKTDISVDELKKLTTVEAADAKVGTILEEGVSLPQKTNAQGLVVDALDSKSNVRYLYVEDLKNSPSNITKAYAVPFVLELPVANSTGTGFLSEINIYPKNVVTDEPKTDKDVKKLGQDDAGYTIGEEFKWFLKSTIPANLGDYEKFEITDKFADGLTYKSVGKIKIGSKTLNRDEHYTIDEPTVDNQNTLKITFKPEKFKEIAELLKGMTLVKNQDALDKATANTDDAAFLEIPVASTINEKAVLGKAIENTFELQYDHTPDKADNPKPSNPPRKPEVHTGGKRFVKKDSTETQTLGGAEFDLLASDGTAVKWTDALIKANTNKNYIAGEAVTGQPIKLKSHTDGTFEIKGLAYAVDANAEGTAVTYKLKETKAPEGYVIPDKEIEFTVSQTSYNTKPTDITVDSADATPDTIKNNKRPSIPNTG

SEQ ID NO: 5 - protein, 5 aa, Artificial
  cell wall anchor motif
IPNTG

SEQ ID NO: 6 - protein, 520 aa, Streptococcus agalactiae
MKLSKKLLFSAAVLTMVAGSTVEPVAQFATGMSIVRAAEVSQERPAKTTVNIYKLQADSYKSEITSNGGIENKDGEVISNYAKLGDNVKGLQGVQFKRYKVKTDISVDELKKLTTVEAADAKVGTILEEGVSLPQKTNAQGLVVDALDSKSNVRYLYVEDLKNSPSNITKAYAVPFVLELPVANSTGTGFLSEINIYPKNVVTDEPKTDKDVKKLGQDDAGYTIGEEFKWFLKSTIPANLGDYEKFEITDKFADGLTYKSVGKIKIGSKTLNRDEHYTIDEPTVDNQNTLKITFKPEKFKEIAELLKGMTLVKNQDALDKATANTDDAAFLEIPVASTINEKAVLGKAIENTFELQYDHTPDKADNPKPSNPPRKPEVHTGGKRFVKKDSTETQTLGGAEFDLLASDGTAVKWTDALIKANTNKNYIAGEAVTGQPIKLKSHTDGTFEIKGLAYAVDANAEGTAVTYKLKETKAPEGYVIPDKEIEFTVSQTSYNTKPTDITVDSADATPDTIKNNKRPS

SEQ ID NO: 7 - protein, 483 aa, Streptococcus agalactiae
AEVSQERPAKTTVNIYKLQADSYKSEITSNGGIENKDGEVISNYAKLGDNVKGLQGVQFKRYKVKTDISVDELKKLTTVEAADAKVGTILEEGVSLPQKTNAQGLVVDALDSKSNVRYLYVEDLKNSPSNITKAYAVPFVLELPVANSTGTGFLSEINIYPKNVVTDEPKTDKDVKKLGQDDAGYTIGEEFKWFLKSTIPANLGDYEKFEITDKFADGLTYKSVGKIKIGSKTLNRDEHYTIDEPTVDNQNTLKITFKPEKFKEIAELLKGMTLVKNQDALDKATANTDDAAFLEIPVASTINEKAVLGKAIENTFELQYDHTPDKADNPKPSNPPRKPEVHTGGKRFVKKDSTETQTLGGAEFDLLASDGTAVKWTDALIKANTNKNYIAGEAVTGQPIKLKSHTDGTFEIKGLAYAVDANAEGTAVTYKLKETKAPEGYVIPDKEIEFTVSQTSYNTKPTDITVDSADATPDTIKNNKRPS

SEQ ID NO: 8 - protein, 271 aa, Streptococcus agalactiae
AEVSQERPAKTTVNIYKLQADSYKSEITSNGGIENKDGEVISNYAKLGDNVKGLQGVQFKRYKVKTDISVDELKKLTTVEAADAKVGTILEEGVSLPQKTNAQGLVVDALDSKSNVRYLYVEDLKNSPSNITKAYAVPFVLELPVANSTGTGFLSEINIYPKNVVTDEPKTDKDVKKLGQDDAGYTIGEEFKWFLKSTIPANLGDYEKFEITDKFADGLTYKSVGKIKIGSKTLNRDEHYTIDEPTVDNQNTLKITFKPEKFKEIAELLKG

SEQ ID NO: 9 - protein, 212 aa, Streptococcus agalactiae
MTLVKNQDALDKATANTDDAAFLEIPVASTINEKAVLGKAIENTFELQYDHTPDKADNPKPSNPPRKPEVHTGGKRFVKKDSTETQTLGGAEFDLLASDGTAVKWTDALIKANTNKNYIAGEAVTGQPIKLKSHTDGTFEIKGLAYAVDANAEGTAVTYKLKETKAPEGYVIPDKEIEFTVSQTSYNTKPTDITVDSADATPDTIKNNKRPS

SEQ ID NO: 10 - DNA, 2670 bp, Streptococcus agalactiae
atgaaaaagagacaaaaaatatggagagggttatcagttactttactaatcctgtcccaaattccatttggtatattggtacaaggtgaaacccaagataccaatcaagcacttggaaaagtaattgttaaaaaaacgggagacaatgctacaccattaggcaaagcgacttttgtgttaaaaaatgacaatgataagtcagaaacaagtcacgaaacggtagagggttctggagaagcaacctttgaaaacataaaacctggagactacacattaagagaagaaacagcaccaattggttataaaaaaactgataaaacctggaaagttaaagttgcagataacggagcaacaataatcgagggtatggatgcagataaagcagagaaacgaaaagaagttttgaatgcccaatatccaaaatcagctatttatgaggatacaaaagaaaattacccattagttaatgtagagggttccaaagttggtgaacaatacaaagcattgaatccaataaatggaaaagatggtcgaagagagattgctgaaggttggttatcaaaaaaaattacaggggtcaatgatctcgataagaataaatataaaattgaattaactgttgagggtaaaaccactgttgaaacgaaagaacttaatcaaccactagatgtcgttgtgctattagataattcaaatagtatgaataatgaaagagccaataattctcaaagagcattaaaagctggggaagcagttgaaaagctgattgataaaattacatcaaataaagacaatagagtagctcttgtgacatatgcctcaaccatttttgatggtactgaagcgaccgtatcaaagggagttgccgatcaaaatggtaaagcgctgaatgatagtgtatcatgggattatcataaaactacttttacagcaactacacataattacagttatttaaatttaacaaatgatgctaacgaagttaatattctaaagtcaagaattccaaaggaagcggagcatataaatggggatcgcacgctctatcaatttggtgcgacatttactcaaaaagctctaatgaaagcaaatgaaattttagagacacaaagttctaatgctagaaaaaaacttatttttcacgtaactgatggtgtccctacgatgtcttatgccataaattttaatccttatatatcaacatcttaccaaaaccagtttaattcttttttaaataaaataccagatagaagtggtattctccaagaggattttataatcaatggtgatgattatcaaatagtaaaaggagatggagagagttttaaactgttttcggatagaaaagttcctgttactggaggaacgacacaagcagcttatcgagtaccgcaaaatcaactctctgtaatgagtaatgagggatatgcaattaatagtggatatatttatctctattggagagattacaactgggtctatccatttgatcctaagacaaagaaagtttctgcaacgaaacaaatcaaaactcatggtgagccaacaacattatactttaatggaaatataagacctaaaggttatgacatttttactgttgggattggtgtaaacggagatcctggtgcaactcctcttgaagctgagaaatttatgcaatcaatatcaagtaaaacagaaaattatactaatgttgatgatacaaataaaatttatgatgagctaaataaatactttaaaacaattgttgaggaaaaacattctattgttgatggaaatgtgactgatcctatgggagagatgattgaattccaattaaaaaatggtcaaagttttacacatgatgattacgttttggttggaaatgatggcagtcaattaaaaaatggtgtggctcttggtggaccaaacagtgatgggggaattttaaaagatgttacagtgacttatgataagacatctcaaaccatcaaaatcaatcatttgaacttaggaagtggacaaaaagtagttcttacctatgatgtacgtttaaaagataactatataagtaacaaattttacaatacaaataatcgtacaacgctaagtccgaagagtgaaaaagaaccaaatactattcgtgatttcccaattcccaaaattcgtgatgttcgtgagtttccggtactaaccatcagtaatcagaagaaaatgggtgaggttgaatttattaaagttaataaagacaaacattcagaatcgcttttgggagctaagtttcaacttcagatagaaaaagatttttctgggtataagcaatttgttccagagggaagtgatgttacaacaaagaatgatggtaaaatttattttaaagcacttcaagatggtaactataaattatatgaaatttcaagtccagatggctatatagaggttaaaacgaaacctgttgtgacatttacaattcaaaatggagaagttacgaacctgaaagcagatccaaatgctaataaaaatcaaatcgggtatcttgaaggaaatggtaaacatcttattaccaacactcccaaacgcccaccaggtgtttttcctaaaacagggggaattggtacaattgtctatatattagttggttctacttttatgatacttaccatttgttctttccgtcgtaaacaattg

SEQ ID NO: 11 - protein, 890 aa, Streptococcus agalactiae
MKKRQKIWRGLSVTLLILSQIPFGILVQGETQDTNQALGKVIVKKTGDNATPLGKATFVLKNDNDKSETSHETVEGSGEATFENIKPGDYTLREETAPIGYKKTDKTWKVKVADNGATIIEGMDADKAEKRKEVLNAQYPKSAIYEDTKENYPLVNVEGSKVGEQYKALNPINGKDGRREIAEGWLSKKITGVNDLDKNKYKIELTVEGKTTVETKELNQPLDVVVLLDNSNSMNNERANNSQRALKAGEAVEKLIDKITSNKDNRVALVTYASTIFDGTEATVSKGVADQNGKALNDSVSWDYHKTTFTATTHNYSYLNLTNDANEVNILKSRIPKEAEHINGDRTLYQFGATFTQKALMKANEILETQSSNARKKLIFHVTDGVPTMSYAINFNPYISTSYQNQFNSFLNKIPDRSGILQEDFIINGDDYQIVKGDGESFKLFSDRKVPVTGGTTQAAYRVPQNQLSVMSNEGYAINSGYIYLYWRDYNWVYPFDPKTKKVSATKQIKTHGEPTTLYFNGNIRPKGYDIFTVGIGVNGDPGATPLEAEKFMQSISSKTENYTNVDDTNKIYDELNKYFKTIVEEKHSIVDGNVTDPMGEMIEFQLKNGQSFTHDDYVLVGNDGSQLKNGVALGGPNSDGGILKDVTVTYDKTSQTIKINHLNLGSGQKVVLTYDVRLKDNYISNKFYNTNNRTTLSPKSEKEPNTIRDFPIPKIRDVREFPVLTISNQKKMGEVEFIKVNKDKHSESLLGAKFQLQIEKDFSGYKQFVPEGSDVTTKNDGKIYFKALQDGNYKLYEISSPDGYIEVKTKPVVTFTIQNGEVTNLKADPNANKNQIGYLEGNGKHLITNTPKRPPGVFPKTGGIGTIVYILVGSTFMILTICSFRRKQL

SEQ ID NO: 12 - protein, 862 aa, Streptococcus agalactiae
GETQDTNQALGKVIVKKTGDNATPLGKATFVLKNDNDKSETSHETVEGSGEATFENIKPGDYTLREETAPIGYKKTDKTWKVKVADNGATIIEGMDADKAEKRKEVLNAQYPKSAIYEDTKENYPLVNVEGSKVGEQYKALNPINGKDGRREIAEGWLSKKITGVNDLDKNKYKIELTVEGKTTVETKELNQPLDVVVLLDNSNSMNNERANNSQRALKAGEAVEKLIDKITSNKDNRVALVTYASTIFDGTEATVSKGVADQNGKALNDSVSWDYHKTTFTATTHNYSYLNLTNDANEVNILKSRIPKEAEHINGDRTLYQFGATFTQKALMKANEILETQSSNARKKLIFHVTDGVPTMSYAINFNPYISTSYQNQFNSFLNKIPDRSGILQEDFIINGDDYQIVKGDGESFKLFSDRKVPVTGGTTQAAYRVPQNQLSVMSNEGYAINSGYIYLYWRDYNWVYPFDPKTKKVSATKQIKTHGEPTTLYFNGNIRPKGYDIFTVGIGVNGDPGATPLEAEKFMQSISSKTENYTNVDDTNKIYDELNKYFKTIVEEKHSIVDGNVTDPMGEMIEFQLKNGQSFTHDDYVLVGNDGSQLKNGVALGGPNSDGGILKDVTVTYDKTSQTIKINHLNLGSGQKVVLTYDVRLKDNYISNKFYNTNNRTTLSPKSEKEPNTIRDFPIPKIRDVREFPVLTISNQKKMGEVEFIKVNKDKHSESLLGAKFQLQIEKDFSGYKQFVPEGSDVTTKNDGKIYFKALQDGNYKLYEISSPDGYIEVKTKPVVTFTIQNGEVTNLKADPNANKNQIGYLEGNGKHLITNTPKRPPGVFPKTGGIGTIVYILVGSTFMILTICSFRRKQL

SEQ ID NO: 13 - protein, 851 aa, Streptococcus agalactiae
MKKRQKIWRGLSVTLLILSQIPFGILVQGETQDTNQALGKVIVKKTGDNATPLGKATFVLKNDNDKSETSHETVEGSGEATFENIKPGDYTLREETAPIGYKKTDKTWKVKVADNGATIIEGMDADKAEKRKEVLNAQYPKSAIYEDTKENYPLVNVEGSKVGEQYKALNPINGKDGRREIAEGWLSKKITGVNDLDKNKYKIELTVEGKTTVETKELNQPLDVVVLLDNSNSMNNERANNSQRALKAGEAVEKLIDKITSNKDNRVALVTYASTIFDGTEATVSKGVADQNGKALNDSVSWDYHKTTFTATTHNYSYLNLTNDANEVNILKSRIPKEAEHINGDRTLYQFGATFTQKALMKANEILETQSSNARKKLIFHVTDGVPTMSYAINFNPYISTSYQNQFNSFLNKIPDRSGILQEDFIINGDDYQIVKGDGESFKLFSDRKVPVTGGTTQAAYRVPQNQLSVMSNEGYAINSGYIYLYWRDYNWVYPFDPKTKKVSATKQIKTHGEPTTLYFNGNIRPKGYDIFTVGIGVNGDPGATPLEAEKFMQSISSKTENYTNVDDTNKIYDELNKYFKTIVEEKHSIVDGNVTDPMGEMIEFQLKNGQSFTHDDYVLVGNDGSQLKNGVALGGPNSDGGILKDVTVTYDKTSQTIKINHLNLGSGQKVVLTYDVRLKDNYISNKFYNTNNRTTLSPKSEKEPNTIRDFPIPKIRDVREFPVLTISNQKKMGEVEFIKVNKDKHSESLLGAKFQLQIEKDFSGYKQFVPEGSDVTTKNDGKIYFKALQDGNYKLYEISSPDGYIEVKTKPVVTFTIQNGEVTNLKADPNANKNQIGYLEGNGKHLITNT

SEQ ID NO: 14 - protein, 823 aa, Streptococcus agalactiae
GETQDTNQALGKVIVKKTGDNATPLGKATFVLKNDNDKSETSHETVEGSGEATFENIKPGDYTLREETAPIGYKKTDKTWKVKVADNGATIIEGMDADKAEKRKEVLNAQYPKSAIYEDTKENYPLVNVEGSKVGEQYKALNPINGKDGRREIAEGWLSKKITGVNDLDKNKYKIELTVEGKTTVETKELNQPLDVVVLLDNSNSMNNERANNSQRALKAGEAVEKLIDKITSNKDNRVALVTYASTIFDGTEATVSKGVADQNGKALNDSVSWDYHKTTFTATTHNYSYLNLTNDANEVNILKSRIPKEAEHINGDRTLYQFGATFTQKALMKANEILETQSSNARKKLIFHVTDGVPTMSYAINFNPYISTSYQNQFNSFLNKIPDRSGILQEDFIINGDDYQIVKGDGESFKLFSDRKVPVTGGTTQAAYRVPQNQLSVMSNEGYAINSGYIYLYWRDYNWVYPFDPKTKKVSATKQIKTHGEPTTLYFNGNIRPKGYDIFTVGIGVNGDPGATPLEAEKFMQSISSKTENYTNVDDTNKIYDELNKYFKTIVEEKHSIVDGNVTDPMGEMIEFQLKNGQSFTHDDYVLVGNDGSQLKNGVALGGPNSDGGILKDVTVTYDKTSQTIKINHLNLGSGQKVVLTYDVRLKDNYISNKFYNTNNRTTLSPKSEKEPNTIRDFPIPKIRDVREFPVLTISNQKKMGEVEFIKVNKDKHSESLLGAKFQLQIEKDFSGYKQFVPEGSDVTTKNDGKIYFKALQDGNYKLYEISSPDGYIEVKTKPVVTFTIQNGEVTNLKADPNANKNQIGYLEGNGKHLITNT

SEQ ID NO: 15 - DNA, 2703 bp, Streptococcus agalactiae
atgagaaaataccaaaaattttctaaaatattgacgttaagtcttttttgtttgtcgcaaataccgcttaataccaatgttttaggggaaagtaccgtaccggaaaatggtgctaaaggaaagttagttgttaaaaagacagatgaccagaacaaaccactttcaaaagctacctttgttttaaaaactactgctcatccagaaagtaaaatagaaaaagtaactgctgagctaacaggtgaagctacttttgataatctcatacctggagattatactttatcagaagaaacagcgcccgaaggttataaaaagactaaccagacttggcaagttaaggttgagagtaatggaaaaactacgatacaaaatagtggtgataaaaattccacaattggacaaaatcaggaagaactagataagcagtatccccccacaggaatttatgaagatacaaaggaatcttataaacttgagcatgttaaaggttcagttccaaatggaaagtcagaggcaaaagcagttaacccatattcaagtgaaggtgagcatataagagaaattccagagggaacattatctaaacgtatttcagaagtaggtgatttagctcataataaatataaaattgagttaactgtcagtggaaaaaccatagtaaaaccagtggacaaacaaaagccgttagatgttgtcttcgtactcgataattctaactcaatgaataacgatggcccaaattttcaaaggcataataaagccaagaaagctgccgaagctcttgggaccgcagtaaaagatattttaggagcaaacagtgataatagggttgcattagttacctatggttcagatatttttgatggtaggagtgtagatgtcgtaaaaggatttaaagaagatgataaatattatggccttcaaactaagttcacaattcagacagagaattatagtcataaacaattaacaaataatgctgaagagattataaaaaggattccgacagaagctcctaaagctaagtggggatctactaccaatggattaactccagagcaacaaaaggagtactatcttagtaaagtaggagaaacatttactatgaaagccttcatggaggcagatgatattttgagtcaagtaaatcgaaatagtcaaaaaattattgttcatgtaactgatggtgttcctacgagatcatatgctattaataattttaaactgggtgcatcatatgaaagccaatttgaacaaatgaaaaaaaatggatatctaaataaaagtaattttctacttactgataagcccgaggatataaaaggaaatggggagagttactttttgtttcccttagatagttatcaaacacagataatctctggaaacttacaaaaacttcattatttagatttaaatcttaattaccctaaaggtacaatttatcgaaatggaccagtgaaagaacatggaacaccaaccaaactttatataaatagtttaaaacagaaaaattatgacatttttaattttggtatcgatatatctggttttagacaagtttataatgaggagtataagaaaaatcaagatggtacttttcaaaaattgaaagaggaagcttttaaactttcagatggagaaatcacagaactaatgaggtcgttctcttccaaacctgagtactacacccctatcgtaacttcagccgatacatctaacaatgaaattttatctaaaattcagcaacaatttgaaacgattttaacaaaagaaaactcaattgttaatggaactatcgaagatcctatgggtgataaaatcaatttacagcttggtaatggacaaacattacagccaagtgattatactttacagggaaatgatggaagtgtaatgaaggatggtattgcaactggtgggcctaataatgatggtggaatacttaagggggttaaattagaatacatcggaaataaactctatgttagaggtttgaatttaggagaaggtcaaaaagtaacactcacatatgatgtgaaactagatgacagttttataagtaacaaattctatgacactaatggtagaacaacattgaatcctaagtcagaggatcctaatacacttagagattttccaatccctaaaattcgtgatgtgagagaatatcctacaataacgattaaaaacgagaagaagttaggtgaaattgaatttataaaagttgataaagataataataagttgcttctcaaaggagctacgtttgaacttcaagaatttaatgaagattataaactttatttaccaataaaaaataataattcaaaagtagtgacgggagaaaacggcaaaatttcttacaaagatttgaaagatggcaaatatcagttaatagaagcagtttcgccggaggattatcaaaaaattactaataaaccaattttaacttttgaagtggttaaaggatcgataaaaaatataatagctgttaataaacagatttctgaatatcatgaggaaggtgacaagcatttaattaccaacacgcatattccaccaaaaggaattattcctatgacaggtgggaaaggaattctatctttcattttaataggtggagctatgatgtctattgcaggtggaatttatatttggaaaaggtataagaaatctagtgatatgtccatcaaaaaagat

SEQ ID NO: 16 - protein, 901 aa, Streptococcus agalactiae
MRKYQKFSKILTLSLFCLSQIPLNTNVLGESTVPENGAKGKLVVKKTDDQNKPLSKATFVLKTTAHPESKIEKVTAELTGEATFDNLIPGDYTLSEETAPEGYKKTNQTWQVKVESNGKTTIQNSGDKNSTIGQNQEELDKQYPPTGIYEDTKESYKLEHVKGSVPNGKSEAKAVNPYSSEGEHIREIPEGTLSKRISEVGDLAHNKYKIELTVSGKTIVKPVDKQKPLDVVFVLDNSNSMNNDGPNFQRHNKAKKAAEALGTAVKDILGANSDNRVALVTYGSDIFDGRSVDVVKGFKEDDKYYGLQTKFTIQTENYSHKQLTNNAEEIIKRIPTEAPKAKWGSTTNGLTPEQQKEYYLSKVGETFTMKAFMEADDILSQVNRNSQKIIVHVTDGVPTRSYAINNFKLGASYESQFEQMKKNGYLNKSNFLLTDKPEDIKGNGESYFLFPLDSYQTQIISGNLQKLHYLDLNLNYPKGTIYRNGPVKEHGTPTKLYINSLKQKNYDIFNFGIDISGFRQVYNEEYKKNQDGTFQKLKEEAFKLSDGEITELMRSFSSKPEYYTPIVTSADTSNNEILSKIQQQFETILTKENSIVNGTIEDPMGDKINLQLGNGQTLQPSDYTLQGNDGSVMKDGIATGGPNNDGGILKGVKLEYIGNKLYVRGLNLGEGQKVTLTYDVKLDDSFISNKFYDTNGRTTLNPKSEDPNTLRDFPIPKIRDVREYPTITIKNEKKLGEIEFIKVDKDNNKLLLKGATFELQEFNEDYKLYLPIKNNNSKVVTGENGKISYKDLKDGKYQLIEAVSPEDYQKITNKPILTFEVVKGSIKNIIAVNKQISEYHEEGDKHLITNTHIPPKGIIPMTGGKGILSFILIGGAMMSIAGGIYIWKRYKKSSDMSIKKD

SEQ ID NO: 17 - protein, 869 aa, Streptococcus agalactiae
MRKYQKFSKILTLSLFCLSQIPLNTNVLGESTVPENGAKGKLVVKKTDDQNKPLSKATFVLKTTAHPESKIEKVTAELTGEATFDNLIPGDYTLSEETAPEGYKKTNQTWQVKVESNGKTTIQNSGDKNSTIGQNQEELDKQYPPTGIYEDTKESYKLEHVKGSVPNGKSEAKAVNPYSSEGEHIREIPEGTLSKRISEVGDLAHNKYKIELTVSGKTIVKPVDKQKPLDVVFVLDNSNSMNNDGPNFQRHNKAKKAAEALGTAVKDILGANSDNRVALVTYGSDIFDGRSVDVVKGFKEDDKYYGLQTKFTIQTENYSHKQLTNNAEEIIKRIPTEAPKAKWGSTTNGLTPEQQKEYYLSKVGETFTMKAFMEADDILSQVNRNSQKIIVHVTDGVPTRSYAINNFKLGASYESQFEQMKKNGYLNKSNFLLTDKPEDIKGNGESYFLFPLDSYQTQIISGNLQKLHYLDLNLNYPKGTIYRNGPVKEHGTPTKLYINSLKQKNYDIFNFGIDISGFRQVYNEEYKKNQDGTFQKLKEEAFKLSDGEITELMRSFSSKPEYYTPIVTSADTSNNEILSKIQQQFETILTKENSIVNGTIEDPMGDKINLQLGNGQTLQPSDYTLQGNDGSVMKDGIATGGPNNDGGILKGVKLEYIGNKLYVRGLNLGEGQKVTLTYDVKLDDSFISNKFYDTNGRTTLNPKSEDPNTLRDFPIPKIRDVREYPTITIKNEKKLGEIEFIKVDKDNNKLLLKGATFELQEFNEDYKLYLPIKNNNSKVVTGENGKISYKDLKDGKYQLIEAVSPEDYQKITNKPILTFEVVKGSIKNIIAVNKQISEYHEEGDKHLITNTHIPPKGIIPMTGGKGILS

SEQ ID NO: 18 - protein, 5 aa, Artificial
  cell wall anchor motif
IPMTG

SEQ ID NO: 19 - protein, 858 aa, Streptococcus agalactiae
MRKYQKFSKILTLSLFCLSQIPLNTNVLGESTVPENGAKGKLVVKKTDDQNKPLSKATFVLKTTAHPESKIEKVTAELTGEATFDNLIPGDYTLSEETAPEGYKKTNQTWQVKVESNGKTTIQNSGDKNSTIGQNQEELDKQYPPTGIYEDTKESYKLEHVKGSVPNGKSEAKAVNPYSSEGEHIREIPEGTLSKRISEVGDLAHNKYKIELTVSGKTIVKPVDKQKPLDVVFVLDNSNSMNNDGPNFQRHNKAKKAAEALGTAVKDILGANSDNRVALVTYGSDIFDGRSVDVVKGFKEDDKYYGLQTKFTIQTENYSHKQLTNNAEEIIKRIPTEAPKAKWGSTTNGLTPEQQKEYYLSKVGETFTMKAFMEADDILSQVNRNSQKIIVHVTDGVPTRSYAINNFKLGASYESQFEQMKKNGYLNKSNFLLTDKPEDIKGNGESYFLFPLDSYQTQIISGNLQKLHYLDLNLNYPKGTIYRNGPVKEHGTPTKLYINSLKQKNYDIFNFGIDISGFRQVYNEEYKKNQDGTFQKLKEEAFKLSDGEITELMRSFSSKPEYYTPIVTSADTSNNEILSKIQQQFETILTKENSIVNGTIEDPMGDKINLQLGNGQTLQPSDYTLQGNDGSVMKDGIATGGPNNDGGILKGVKLEYIGNKLYVRGLNLGEGQKVTLTYDVKLDDSFISNKFYDTNGRTTLNPKSEDPNTLRDFPIPKIRDVREYPTITIKNEKKLGEIEFIKVDKDNNKLLLKGATFELQEFNEDYKLYLPIKNNNSKVVTGENGKISYKDLKDGKYQLIEAVSPEDYQKITNKPILTFEVVKGSIKNIIAVNKQISEYHEEGDKHLITNTHIPPKGI

SEQ ID NO: 20 - DNA, 921 bp, Streptococcus agalactiae
atgaaacaaacattaaaacttatgttttcttttctgttgatgttagggactatgtttggaattagccaaactgttttagcgcaagaaactcatcagttgacgattgttcatcttgaagcaagggatattgatcgtccaaatccacagttggagattgcccctaaagaagggactccaattgaaggagtactctatcagttgtaccaattaaaatcaactgaagatggcgatttgttggcacattggaattccctaactatcacagaattgaaaaaacaggcgcagcaggtttttgaagccactactaatcaacaaggaaaggctacatttaaccaactaccagatggaatttattatggtctggcggttaaagccggtgaaaaaaatcgtaatgtctcagctttcttggttgacttgtctgaggataaagtgatttatcctaaaatcatctggtccacaggtgagttggacttgcttaaagttggtgtggatggtgataccaaaaaaccactagcaggcgttgtctttgaactttatgaaaagaatggtaggactcctattcgtgtgaaaaatggggtgcattctcaagatattgacgctgcaaaacatttagaaacagattcatcagggcatatcagaatttccgggctcatccatggggactatgtcttaaaagaaatcgagacacagtcaggatatcagatcggacaggcagagactgctgtgactattgaaaaatcaaaaacagtaacagtaacgattgaaaataaaaaagttccgacacctaaagtgccatctcgaggaggtcttattcccaaaacaggtgagcaacaggcaatggcacttgtaattattggtggtattttaattgctttagccttacgattactatcaaaacatcggaaacatcaaaataaggat

SEQ ID NO: 21 - protein, 307 aa, Streptococcus agalactiae
MKQTLKLMFSFLLMLGTMFGISQTVLAQETHQLTIVHLEARDIDRPNPQLEIAPKEGTPIEGVLYQLYQLKSTEDGDLLAHWNSLTITELKKQAQQVFEATTNQQGKATFNQLPDGIYYGLAVKAGEKNRNVSAFLVDLSEDKVIYPKIIWSTGELDLLKVGVDGDTKKPLAGVVFELYEKNGRTPIRVKNGVHSQDIDAAKHLETDSSGHIRISGLIHGDYVLKEIETQSGYQIGQAETAVTIEKSKTVTVTIENKKVPTPKVPSRGGLIPKTGEQQAMALVIIGGILIALALRLLSKHRKHQNKD

SEQ ID NO: 22 - DNA, 918 bp, Streptococcus agalactiae
atgggacaaaaatcaaaaatatctctagctacgaatattcgtatatggatttttcgtttaattttcttagcgggtttccttgttttggcatttcccatcgttagtcaggtcatgtactttcaagcctctcacgccaatattaatgcttttaaagaagctgttaccaagattgaccgggtggagattaatcggcgtttagaacttgcttatgcttataacgccagtatagcaggtgccaaaactaatggcgaatatccagcgcttaaagacccctactctgctgaacaaaagcaggcaggggtcgttgagtacgcccgcatgcttgaagtcaaagaacaaataggtcatgtgattattccaagaattaatcaggatatccctatttacgctggctctgctgaagaaaatcttcagaggggcgttggacatttagaggggaccagtcttccagtcggtggtgagtcaactcatgccgttctaactgcccatcgagggctaccaacggccaagctatttaccaatttagacaaggtaacagtaggtgaccgtttttacattgaacacatcggcggaaagattgcttatcaggtagaccaaatcaaagttatcgcccctgatcagttagaggatttgtacgtgattcaaggagaagatcacgtcaccctattaacttgcacaccttatatgataaatagtcatcgcctcctcgttcgaggcaagcgaattccttatgtggaaaaaacagtgcagaaagattcaaagaccttcaggcaacaacaatacctaacctatgctatgtgggtagtcgttggacttatcttgctgtcgcttctcatttggtttaaaaagacgaaacagaaaaagcggagaaagaatgaaaaagcggctagtcaaaatagtcacaataattcgaaataa

SEQ ID NO: 23 - protein, 305 aa, Streptococcus agalactiae
MGQKSKISLATNIRIWIFRLIFLAGFLVLAFPIVSQVMYFQASHANINAFKEAVTKIDRVEINRRLELAYAYNASIAGAKTNGEYPALKDPYSAEQKQAGVVEYARMLEVKEQIGHVIIPRINQDIPIYAGSAEENLQRGVGHLEGTSLPVGGESTHAVLTAHRGLPTAKLFTNLDKVTVGDRFYIEHIGGKIAYQVDQIKVIAPDQLEDLYVIQGEDHVTLLTCTPYMINSHRLLVRGKRIPYVEKTVQKDSKTFRQQQYLTYAMWVVVGLILLSLLIWFKKTKQKKRRKNEKAASQNSHNNSK

SEQ ID NO: 24 - DNA, 783 bp, Streptococcus agalactiae
atgggaagtctgattctcttatttccgattgtgagccaggtaagttactaccttgcttcgcatcaaaatattaatcaatttaagcgggaagtcgctaagattgatactaatacggttgaacgacgcatcgctttagctaatgcttacaatgagacgttatcaaggaatcccttgcttatagacccttttaccagtaagcaaaaagaaggtttgagagagtatgctcgtatgcttgaagttcatgagcaaataggtcatgtggcaatcccaagtattggggttgatattccaatttatgctggaacatccgaaactgtgcttcagaaaggtagtgggcatttggagggaaccagtcttccagtgggaggtttgtcaacccattcagtactaactgcccaccgtggcttgccaacagctaggctatttaccgacttaaataaagttaaaaaaggccagattttctatgtgacgaacatcaaggaaacacttgcctacaaagtcgtgtctatcaaagttgtggatccaacagctttaagtgaggttaagattgtcaatggtaaggattatataaccttgctgacttgcacaccttacatgatcaatagtcatcgtctcttggtaaaaggagagcgtattccttatgattctaccgaggcggaaaagcacaaagaacaaaccgtacaagattatcgtttgtcactagtgttgaagatactactagtattattaattggactcttcatcgtgataatgatgagaagatggatgcaacatcgtcaataa

SEQ ID NO: 25 - protein, 260 aa, Streptococcus agalactiae
MGSLILLFPIVSQVSYYLASHQNINQFKREVAKIDTNTVERRIALANAYNETLSRNPLLIDPFTSKQKEGLREYARMLEVHEQIGHVAIPSIGVDIPIYAGTSETVLQKGSGHLEGTSLPVGGLSTHSVLTAHRGLPTARLFTDLNKVKKGQIFYVTNIKETLAYKVVSIKVVDPTALSEVKIVNGKDYITLLTCTPYMINSHRLLVKGERIPYDSTEAEKHKEQTVQDYRLSLVLKILLVLLIGLFIVIMMRRWMQHRQ

SEQ ID NO: 26 - DNA, 924 bp, Streptococcus agalactiae
atgaaaaagattagaaaaagtttaggacttctactatgttgctttttaggattggtacaattagcgtttttttcggtagccagtgtaaatgctgatacccctaatcaactaacaatcacacagataggacttcagccaaatactacagaggaggggatttcttatcgtttatggactgtgactgacaacttaaaagttgatttattgagccaaatgacagatagcgaattgaaccagaagtataagagtatcttgacttctcctactgatactaatggtcagacaaagatagcactcccaaatggttcgtactttggtcgtgcttataaagctgatcaaagcgtttcaacaatagtacctttttatattgaattaccagatgataagttatcaaatcaattacagataaatcctaagcgaaaagttgaaacaggccgattaaaacttattaaatatacaaaagaaggaaagataaagaaaaggctatccggagtaatatttgtattatacgataaccagaatcagccagttcgctttaaaaatggacgatttacgaccgatcaagatgggattacttcattagtaactgatgataagggagaaattgaggttgaaggtttattacctggtaagtatatttttcgagaagcaaaagcactaactggttaccgtatatctatgaaggatgctgtagttgctgtagttgctaataaaacacaggaagtagaggtagaaaacgaaaaagaaactcctccaccaacaaatcctaaaccatcacaaccgctttttccacaatcatttcttcctaaaacaggaatgattattggtggaggactgacaattcttggttgtattattttgggaattttgtttatctttttaagaaaaactaaaaatagcaaatctgaaagaaacgatacagta

SEQ ID NO: 27 - protein, 308 aa, Streptococcus agalactiae
MKKIRKSLGLLLCCFLGLVQLAFFSVASVNADTPNQLTITQIGLQPNTTEEGISYRLWTVTDNLKVDLLSQMTDSELNQKYKSILTSPTDTNGQTKIALPNGSYFGRAYKADQSVSTIVPFYIELPDDKLSNQLQINPKRKVETGRLKLIKYTKEGKIKKRLSGVIFVLYDNQNQPVRFKNGRFTTDQDGITSLVTDDKGEIEVEGLLPGKYIFREAKALTGYRISMKDAVVAVVANKTQEVEVENEKETPPPTNPKPSQPLFPQSFLPKTGMIIGGGLTILGCIILGILFIFLRKTKNSKSERNDTV

SEQ ID NO: 28 - DNA, 885 bp, Streptococcus agalactiae
atgggaggaaaatttcagaaaaaccttaagaaatcggtcgttttaaatcgatggatgaatgtaggcttgatactattgttcttagttggtcttttgataacctcatatccttttatttcaaattggtactataatattaaagctaataatcaagtaactaactttgataatcaaacccaaaaattaaatactaaagagattaatagacgatttgagttagcaaaagcttataatagaacactggacccaagccgcctatcagatccctatactgaaaaagaaaaaaaaggtattgctgaatacgcccacatgcttgagattgctgaaatgattggatatattgatataccgtctatcaagcaaaaattacctatctatgcggggactaccagtagtgttcttgaaaaaggagcaggacaccttgaaggaacctccttgccaattggtggaaaaagttcacatactgttatcacagctcatcgcggcttacctaaagctaagttatttacagatttagataaacttaaaaaaggaaaaattttttatattcataatatcaaagaagttttagcctataaggttgatcaaataagtgttgtaaagccagataatttttctaaattattggttgttaaaggtaaggattatgcgactttgctaacatgtacaccttattcgattaattcacatcgtttactagttagagggcatcgaatcaagtatgtacctcctgttaaagaaaagaactatttaatgaaagaattgcaaacacactataaactttatttcctcttatcaatcctagttattcttatattagtcgctttactattatatttaaaacgaaaatttaaagagagaaagagaaagggaaatcaaaaatga

SEQ ID NO: 29 - protein, 294 aa, Streptococcus agalactiae
MGGKFQKNLKKSVVLNRWMNVGLILLFLVGLLITSYPFISNWYYNIKANNQVTNFDNQTQKLNTKEINRRFELAKAYNRTLDPSRLSDPYTEKEKKGIAEYAHMLEIAEMIGYIDIPSIKQKLPIYAGTTSSVLEKGAGHLEGTSLPIGGKSSHTVITAHRGLPKAKLFTDLDKLKKGKIFYIHNIKEVLAYKVDQISVVKPDNFSKLLVVKGKDYATLLTCTPYSINSHRLLVRGHRIKYVPPVKEKNYLMKELQTHYKLYFLLSILVILILVALLLYLKRKFKERKRKGNQK

SEQ ID NO: 30 - DNA, 882 bp, Streptococcus agalactiae
gtgaagactaaaaaaatcatcaaaaaaacaaaaaaaaagaagaagtcaaatcttccttttatcattctttttctaataggtctatctattttattgtatccagtggtatcacgtttttactatacgatagaatctaataatcaaacacaggattttgagagagctgctaaaaaacttagtcagaaagaaatcaatcgacgtatggctctagcacaagcttataatgattctttaaataatgtccatcttgaagatccttatgagaaaaaacgaattcaaaagggggtagcagagtacgcccgtatgttagaggtaagtgaaaaaatcggaacaatttcagttcctaagataggtcaaaaactccctatatttgcaggttcaagtcaagaagttctatctaaaggagcagggcatttagaaggtacctctcttccaattgggggcaatagtacacatactgttataacagcgcattcaggaattccagataaagaactcttttctaaccttaaaaagttaaaaaaaggagataagttttatattcaaaacataaaagaaacgatagcatatcaagtagatcagataaaagtcgttacacccgataacttttcagatttgttggttgttcctggacatgattatgcaaccttattgacttgcaccccgattatgatcaatacacacagacttttagtaaggggacatcgtatcccttataaaggtcctattgatgaaaaattaataaaagacggtcatttaaacacgatttatagatatctattctatatatctttagttattattgcttggttactttggttaataaaacgtcaacgtcaaaaaaatcgtttagcaagtgttagaaaaggaattgaatcataa

SEQ ID NO: 31 - protein, 293 aa, Streptococcus agalactiae
MKTKKIIKKTKKKKKSNLPFIILFLIGLSILLYPVVSRFYYTIESNNQTQDFERAAKKLSQKEINRRMALAQAYNDSLNNVHLEDPYEKKRIQKGVAEYARMLEVSEKIGTISVPKIGQKLPIFAGSSQEVLSKGAGHLEGTSLPIGGNSTHTVITAHSGIPDKELFSNLKKLKKGDKFYIQNIKETIAYQVDQIKVVTPDNFSDLLVVPGHDYATLLTCTPIMINTHRLLVRGHRIPYKGPIDEKLIKDGHLNTIYRYLFYISLVIIAWLLWLIKRQRQKNRLASVRKGIES

SEQ ID NO: 32 - protein, 199 aa, Streptococcus agalactiae
MIRRYSANFLAILGIILVSSGIYWGWYNINQAHQADLTSQHIVKVLDKSITHQVKGSENGELPVKKLDKTDYLGTLDIPNLKLHLPVAANYSFEQLSKTPTRYYGSYLTNNMVICAHNFPYHFDALKNVDMGTDVYFTTTTGQIYHYKISNREIIEPTAIEKVYKTATSDNDWDLSLFTCTKAGVARVLVRCQLIDVKN

SEQ ID NO: 33 - protein, 223 aa, Streptococcus agalactiae
MIYKKILKITLLLLFSLSTQLVSADTNDQMKTGSITIQNKYNNQGIAGGNLLVYQVAQAKDVDGNQVFTLTTPFQGIGIKDDDLTQVNLDSNQAKYVNLLTKAVHKTQPLQTFDNLPAEGIVANNLPQGIYLFIQTKTAQGYELMSPFILSIPKDGKYDITAFEKMSPLNAKPKKEETITPTVTHQTKGKLPFTGQVWWPIPILIMSGLLCLIIALKWRRRRD

SEQ ID NO: 34 - protein, 268 aa, Streptococcus agalactiae
MAYPSLANYWNSFHQSRAIMDYQDRVTHMDENDYKKIINRAKEYNKQFKTSGMKWHMTSQERLDYNSQLAIDKTGNMGYISIPKINIKLPLYHGTSEKVLQTSIGHLEGSSLPIGGDSTHSILSGHRGLPSSRLFSDLDKLKVGDHWTVSILNETYTYQVDQIRTVKPDDLRDLQIVKGKDYQTLVTCTPYGVNTHRLLVRGHRVPNDNGNALVVAEAIQIEPIYIAPFIAIFLTLILLLISLEVTRRARQRKKILKQAMRKEENNDL

SEQ ID NO: 35 - protein, 502 aa, Streptococcus agalactiae
MKKKMIQSLLVASLAFGMAVSPVTPIAFAAETGTITVQDTQKGATYKAYKVFDAEIDNANVSDSNKDGASYLIPQGKEAEYKASTDFNSLFTTTTNGGRTYVTKKDTASANEIATWAKSISANTTPVSTVTESNNDGTEVINVSQYGYYYVSSTVNNGAVIMVTSVTPNATIHEKNTDATWGDGGGKTVDQKTYSVGDTVKYTITYKNAVNYHGTEKVYQYVIKDTMPSASVVDLNEGSYEVTITDGSGNITTLTQGSEKATGKYNLLEENNNFTITIPWAATNTPTGNTQNGANDDFFYKGINTITVTYTGVLKSGAKPGSADLPENTNIATINPNTSNDDPGQKVTVRDGQITIKKIDGSTKASLQGAIFVLKNATGQFLNFNDTNNVEWGTEANATEYTTGADGIITITGLKEGTYYLVEKKAPLGYNLLDNSQKVILGDGATDTTNSDNLLVNPTVENNKGTELPSTGGIGTTIFYIIGAILVIGAGIVLVARRRLRS

SEQ ID NO: 36 - protein, 1434 aa, Streptococcus agalactiae
MLKKCQTFIIESLKKKKHPKEWKIIMWSLMILTTFLTTYFLILPAITVEETKTDDVGITLENKNSSQVTSSTSSSQSSVEQSKPQTPASSVTETSSSEEAAYREEPLMFRGADYTVTVTLTKEAKIPKNADLKVTELKDNSATFKDYKKKALTEVAKQDSEIKNFKLYDITIESNGKEAEPQAPVKVEVNYDKPLEASDENLKVVHFKDDGQTEVLKSKDTAETKNTSSDVAFKTDSFSIYAIVQEDNTEVPRLTYHFQNNDGTDYDFLTASGMQVHHQIIKDGESLGEVGIPTIKAGEHFNGWYTYDPTTGKYGDPVKFGEPITVTETKEICVRPFMSKVATVTLYDDSAGKSILERYQVPLDSSGNGTADLSSFKVSPPTSTLLFVGWSKTQNGAPLSESEIQALPVSSDISLYPVFKESYGVEFNTGDLSTGVTYIAPRRVLTGQPASTIKPNDPTRPGYTFAGWYTAASGGAAFDFNQVLTKDTTLYAHWSPAQTTYTINYWQQSATDNKNATDAQKTYEYAGQVTRSGLSLSNQTLTQQDINDKLPTGFKVNNTRTETSVMIKDDGSSVVNVYYDRKLITIKFAKYGGYSLPEYYYSYNWSSDADTYTGLYGTTLAANGYQWKTGAWGYLANVGNNQVGTYGMSYLGEFILPNDTVDSDVIKLFPKGNIVQTYRFFKQGLDGTYSLADTGGGAGADEFTFTEKYLGFNVKYYQRLYPDNYLFDQYASQTSAGVKVPISDEYYDRYGAYHKDYLNLVVWYERNSYKIKYLDPLDNTELPNFPVKDVLYEQNLSSYAPDTTTVQPKPSRPGYVWDGKWYKDQAQTQVFDFNTTMPPHDVKVYAGWQKVTYRVNIDPNGGRLSKTDDTYLDLHYGDRIPDYTDITRDYIQDPSGTYYYKYDSRDKDPDSTKDAYYTTDTSLSNVDTTTKYKYVKDAYKLVGWYYVNPDGSIRPYNFSGAVTQDINLRAIWRKAGDYHIIYSNDAVGTDGKPALDASGQQLQTSNEPTDPDSYDDGSHSALLRRPTMPDGYRFRGWWYNGKIYNPYDSIDIDAHLADANKNITIKPVIIPVGDIKLEDTSIKYNGNGGTRVENGNVVTQVETPRMELNSTTTIPENQYFTRTGYNLIGWHHDKDLADTGRVEFTAGQSIGIDNNPDATNTLYAVWQPKEYTVRVSKTVVGLDEDKTKDFLFNPSETLQQENFPLRDGQTKEFKVPYGTSISIDEQAYDEFKVSESITEKNLATGEADKTYDATGLQSLTVSGDVDISFTNTRIKQKVRLQKVNVENDNNFLAGAVFDIYESDANGNKASHPMYSGLVTNDKGLLLVDANNYLSLPVGKYYLTETKAPPGYLLPKNDISVLVISTGVTFEQNGNNATPIKENLVDGSTVYTFKITNSKGTELPSTGGIGTHIYILVGLALALPSGLILYYRKKI

SEQ ID NO: 37 - protein, 189 aa, Streptococcus agalactiae
MKRQISSDKLSQELDRVTYQKRFWSVIKNTIYILMAVASIAILIAVLWLPVLRIYGHSMNKTLSAGDVVFTVKGSNFKTGDVVAFYYNNKVLVKRVIAESGDWVNIDSQGDVYVNQHKLKEPYVIHKALGNSNIKYPYQVPDKKIFVLGDNRKTSIDSRSTSVGDVSEEQIVGKISFRIWPLGKISSIN

SEQ ID NO: 38 - DNA, 1376 bp, Streptococcus agalactiae
atgaataaaaaggtactattgacatcgacaatggcagcttcgctattatcagtcgcaagtgttcaagcacaagaaacagatacgacgtggacagcacgtactgtttcagaggtaaaggctgatttggtaaagcaagacaataaatcatcatatactgtgaaatatggtgatacactaagcgttatttcagaagcaatgtcaattgatatgaatgtcttagcaaaaataaataacattgcagatatcaatcttatttatcctgagacaacactgacagtaacttacgatcagaagagtcatactgccacttcaatgaaaatagaaacaccagcaacaaatgctgctggtcaaacaacagctactgtggatttgaaaaccaatcaagtttctgttgcagaccaaaaagtttctctcaatacaatttcggaaggtatgacaccagaagcagcaacaacgattgtttcgccaatgaagacatattcttctgcgccagctttgaaatcaaaagaagtattagcacaagagcaagctgttagtcaagcagcagctaatgaacaggtatcaccagctcctgtgaagtcgattacttcagaagttccagcagctaaagaggaagttaaaccaactcagacgtcagtcagtcagtcaacaacagtatcaccagcttctgttgccgctgaaacaccagctccagtagctaaagtagcaccggtaagaactgtagcagcccctagagtggcaagtgttaaagtagtcactcctaaagtagaaactggtgcatcaccagagcatgtatcagctccagcagttcctgtgactacgacttcaccagctacagacagtaagttacaagcgactgaagttaagagcgttccggtagcacaaaaagctccaacagcaacaccggtagcacaaccagcttcaacaacaaatgcagtagctgcacatcctgaaaatgcagggctccaacctcatgttgcagcttataaagaaaaagtagcgtcaacttatggagttaatgaattcagtacataccgtgcgggagatccaggtgatcatggtaaaggtttagcagttgactttattgtaggtactaatcaagcacttggtaataaagttgcacagtactctacacaaaatatggcagcaaataacatttcatatgttatctggcaacaaaagttttactcaaatacaaacagtatttatggacctgctaatacttggaatgcaatgccagatcgtggtggcgttactgccaaccactatgaccacgttcacgtatcatttaacaaataatataaaaaaggaagctatttggcttcttttttatatgccttgaatagactttcaaggttcttatataatttttatta

SEQ ID NO: 39 - protein, 432 aa, Streptococcus agalactiae
MNKKVLLTSTMAASLLSVASVQAQETDTTWTARTVSEVKADLVKQDNKSSYTVKYGDTLSVISEAMSIDMNVLAKINNIADINLIYPETTLTVTYDQKSHTATSMKIETPATNAAGQTTATVDLKTNQVSVADQKVSLNTISEGMTPEAATTIVSPMKTYSSAPALKSKEVLAQEQAVSQAAANEQVSPAPVKSITSEVPAAKEEVKPTQTSVSQSTTVSPASVAAETPAPVAKVAPVRTVAAPRVASVKVVTPKVETGASPEHVSAPAVPVTTTSPATDSKLQATEVKSVPVAQKAPTATPVAQPASTTNAVAAHPENAGLQPHVAAYKEKVASTYGVNEFSTYRAGDPGDHGKGLAVDFIVGTNQALGNKVAQYSTQNMAANNISYVIWQQKFYSNTNSIYGPANTWNAMPDRGGVTANHYDHVHVSFNK

SEQ ID NO: 40 - protein, 392 aa, Streptococcus agalactiae
DLVKQDNKSSYTVKYGDTLSVISEAMSIDMNVLAKINNIADINLIYPETTLTVTYDQKSHTATSMKIETPATNAAGQTTATVDLKTNQVSVADQKVSLNTISEGMTPEAATTIVSPMKTYSSAPALKSKEVLAQEQAVSQAAANEQVSPAPVKSITSEVPAAKEEVKPTQTSVSQSTTVSPASVAAETPAPVAKVAPVRTVAAPRVASVKVVTPKVETGASPEHVSAPAVPVTTTSPATDSKLQATEVKSVPVAQKAPTATPVAQPASTTNAVAAHPENAGLQPHVAAYKEKVASTYGVNEFSTYRAGDPGDHGKGLAVDFIVGTNQALGNKVAQYSTQNMAANNISYVIWQQKFYSNTNSIYGPANTWNAMPDRGGVTANHYDHVHVSFNK

SEQ ID NO: 41 - protein, 429 aa, Streptococcus agalactiae
MIEKYLESSIESKCQLVVLFFKTSYLPITEVAEKTGLTFLQLNHYCEELNAFFPDSLSMTIQKRMISCQFTHPFKETYLYQLYASSNVLQLLAFLIKNGSHSRPLTDFARSHFLSNSSAYRMREALIPLLRNFELKLSKNKIVGEEYRIRYLIALLYSKFGIKVYDLTQQDKNTIHSFLSHSSTHLKTSPWLSESFSFYDILLALSWKRHQFSVTIPQTRIFQQLKKLFIYDSLKKSSRDIIETYCQLNFSAGDLDYLYLIYITANNSFASLQWTPEHIRQCCQLFEENDTFRLLLKPIITLLPNLKEQKPSLVKALMFFSKSFLFNLQHFIPETNLFVSPYYKGNQKLYTSLKLIVEEWLAKLPGKRYLNHKHFHLFCHYVEQILRNIQPPLVVVFVASNFINAHLLTDSFPRYFSDKSIDFHSYIAR

SEQ ID NO: 42 - protein, 627 aa, Streptococcus agalactiae
MVSSYMFVRGEKMNNKIFLNKEASFLAHTKRKRRFAVTLVGVFFMLLACAGAIGFGQVAYAADEKTVPSHSSPNPEFPWYGYDAYGKEYPGYNIWTRYHDLRVNLNGSRSYQVYCFNIQSNYPSQKNSFIKNWFKKIEGNGKSFVDYAHTTKLGKEELEQRLLSLLYNAYPNDANGYMKGLEHLNAITVTQYAVWHYSDNSQYQFETLWESEAKEGKISRSQVTLMREALKKLIDPNLEATAVNKIPSGYRLNIFESENEAYQNLLSAEYVPDDPPKPGETSEHNPKTPELDGTPIPEDPKHPDDNLEPTLPPVMLDGEEVPEVPSESLEPALPPLMPELDGQEVPEKPSIDLPIEVPRYEFNNKDQSPLAGESGETEYITEVYGNQQNPVDIDKKLPNETGFSGNMVETEDTKEPEVLMGGQSESVEFTKDTQTGMSGQTTPQVETEDTKEPEVLMGGQSESVEFTKDTQTGMSGQTTPQIETEDTKEPEVLMGGQSESVEFTKDTQTGMSGQTTPQIETEDTKEPEVLMGGQSESVEFTKDTQTGMSGFSETATVVEDTRPKLVFHFDNNEPKVEENREKPTKNITPILPATGDIENVLAFLGILILSVLSIFSLLKNKQSNKKV

SEQ ID NO: 43 - protein, 67 aa, Streptococcus agalactiae
MSLRHQNKKGIRKEGWKSRPQSRWSDHCQLVAQKSVLKQAISKTVLAERGLFSCLDDYLERHALKVN

SEQ ID NO: 44 - protein, 1036 aa, Streptococcus agalactiae
MYSRLKRELVIVINRKKKYKLIRLMVTVGLIFSQLVLPIRRLGLQMISTQTKVIPQEIVTQTETQGTQVVATKQKLESENSSLKVALKRESGFEHNATIDASLDTESQGDNSQRSVTQAIVTMALELRKQGLSIVDTKIVRIQSSTNQRNDITTTLTFKNGLSLEGASTEANDPNVRVGIVNPNDTVQTITPTIKQDADGKVKNLVFTGRLGKQVIIVSTTRLKEEQTISLDSYGELVIDGAVGLSQKDRPPYSKPITVNILKPKLSSIESSLDSKDFEIVKTIDNLYTWDDQFYLLDFISKQYEVLKTDYQSAKDSTPQTRDILFGEYTVEPLVMNKGHNNTINIYIRSTRPLGLKPIGAAPALIQPRSFRSLTPRSTRMKRSAPVEKFEGELEHHKRIDYLGDNQNNPDTTIDDKEDEHDTSDLYRLYLDMTGKKNPLDILVVVDKSGSMQEGIGSVQRYRYYAQRWDDYYSQWVYHGTFDYSSYQGESFNRGQIHYRYRGIVSVSDGIRRDDAVKNSLLGVNGLLQRFVNINPENKLSVIGFQGSADYHAGKWYPDQSPRGGFYQPNLNNSRDAELLKGWSTNSLLDPNTLTALHNNGTNYHAALLKAKEILNEVKDDGRRKIMIFISDGVPTFYFGEDGYRSGNGSSNDRNNVTRSQEGSKLAIDEFKARYPNLSIYSLGVSKDINSDTASSSPVVLKYLSGEEHYYGITDTAELEKTLNKIVEDSKLSQLGISDSLSQYVDYYDKQPDVLVTRKSKVNDETEILYQKDQVQEAGKDIIDKVVFTPKTTSQPKGKVTLTFKSDYKVDDEYTYTLSFNVKASDEAYEKYKDNEGRYSEMGDSDTDYGTNQTSSGKGGLPSNSDASVNYMADGREQKLPYKHPVIQVKTVPITFTKVDADNNQKKLAGVEFELRKEDKKIVWEKGTTGSNGQLNFKYLQKGKTYYLYETKAKLGYTLPENPWEVAVANNGDIKVKHPIEGELKSKDGSYMIKNYKIYQLPSSGGRGSQIFIIVGSMTATVALLFYRRQHRKKQY

SEQ ID NO: 45 - protein, 556 aa, Streptococcus agalactiae
MTNRRETVREKILITAKKLMLACLAILAVVGLGMTRVSALSKDDTAQLKITNIEGGPTVTLYKIGEGVYNTNGDSFINFKYAEGVSLTETGPTSQEITTIANGINTGKIKPFSTENVSISNGTATYNARGASVYIALLTGATDGRTYNPILLAASYNGEGNLVTKNIDSKSNYLYGQTSVAKSSLPSITKKVTGTIDDVNKKTTSLGSVLSYSLTFELPSYTKEAVNKTVYVSDNMSEGLTFNFNSLTVEWKGKMANITEDGSVMVENTKIGIAKEVNNGFNLSFIYDSLESISPNISYKAVVNNKAIVGEEGNPNKAEFFYSNNPTKGNTYDNLDKKPDKGNGITSKEDSKIVYTYQIAFRKVDSVSKTPLIGAIFGVYDTSNKLIDIVTTNKNGYAISTQVSSGKYKIKELKAPKGYSLNTETYEITANWVTATVKTSANSKSTTYTSDKNKATDNSEQVGWLKNGIFYSIDSRPTGNDVKEAYIESTKALTDGTTFSKSNEGSGTVLLETDIPNTKLGELPSTGSIGTYLFKAIGSAAMIGAIGIYIVKRRKA

SEQ ID NO: 46 - protein, 280 aa, Streptococcus agalactiae
MTERLKNLGILLLFLLGTAIFLYPTLSSQWNAYRDRQLLSTYHKQVIQKKPSEMEEVWQKAKAYNARLGIQPVPDAFSFRDGIHDKNYESLLQIENNDIMGYVEVPSIKVTLPIYHYTTDEVLTKGAGHLFGSALPVGGDGTHTVISAHRGLPSAEMFTNLNLVKKGDTFYFRVLNKVLAYKVDQILIVEPDQATSLSGVMGKDYATLVTCTPYGVNTKRLLVRGHRIAYHYKKYQQAKKAMKLVDKSRMWAEVVCAAFGVVIAIILVFMYSRVSAKKSK

SEQ ID NO: 47 - protein, 497 aa, Streptococcus agalactiae
MIEKYLESSIESKCQLIVLFFKTSYLPITEVAEKTGLTFLQLNHYCEELNAFFPGSLSMTIQKRMISCQFTHPFKETYLYQLYASSNVLQLLAFLIKNGSHSRPLTDFARSHFLSNSSAYRMREALIPLLRNFELKLSKNKIVGEEYRIRYLIALLYSKFGIKVYDLTQQDKNTIHSFLSHSSTHLKTSPWLSESFSFYDILLALSWKRHQFSVTIPQTRIFQQLKKLFVYDSLKKSSHDIIETYCQLNFSAGDLDYLYLIYITANNSFASLQWTPEHIRQYCQLFEENDTFRLLLNPIITLLPNLKEQKASLVKALMFFSKSFLFNLQHFIPETNLFVSPYYKGNQKLYTSLKLIVEEWMAKLPGKRDLNHKHFHLFCHYVEQSLRNIQPPLVVVFVASNFINAHLLTDSFPRYFSDKSIDFHSYYLLQDNVYQIPDLKPDLVITHSQLIPFVHHELTKGIAVAEISFDESILSIQELMYQVKEEKFQADLTKQLT

SEQ ID NO: 48 - protein, 762 aa, Streptococcus agalactiae
LRGEKMKKTRFPNKLNTLNTQRVLSKNSKRFTVTLVGVFLMIFALVTSMVGAKTVFGLVESSTPNAINPDSSSEYRWYGYESYVRGHPYYKQFRVAHDLRVNLEGSRSYQVYCFNLKKAFPLGSDSSVKKWYKKHDGISTKFEDYAMSPRITGDELNQKLRAVMYNGHPQNANGIMEGLEPLNAIRVTQEAVWYYSDNAPISNPDESFKRESESNLVSTSQLSLMRQALKQLIDPNLATKMPKQVPDDFQLSIFESEDKGDKYNKGYQNLLSGGLVPTKPPTPGDPPMPPNQPQTTSVLIRKYAIGDYSKLLEGATLQLTGDNVNSFQARVFSSNDIGERIELSDGTYTLTELNSPAGYSIAEPITFKVEAGKVYTIIDGKQIENPNKEIVEPYSVEAYNDFEEFSVLTTQNYAKFYYAKNKNGSSQVVYCFNADLKSPPDSEDGGKTMTPDFTTGEVKYTHIAGRDLFKYTVKPRDTDPDTFLKHIKKVIEKGYREKGQAIEYSGLTETQLRAATQLAIYYFTDSAELDKDKLKDYHGFGDMNDSTLAVAKILVEYAQDSNPPQLTDLDFFIPNNNKYQSLIGTQWHPEDLVDIIRMEDKKEVIPVTHNLTLRKTVTGLAGDRTKDFHFEIELKNNKQELLSQTVKTDKTNLEFKDGKATINLKHGESLTLQGLPEGYSYLVKETDSEGYKVKVNSQEVANATVSKTGITSDETLAFENNKEPVVPTGVDQKINGYLALIVIAGISLGIWGIHTIRIRKHD

SEQ ID NO: 49 - protein, 131 aa, Streptococcus agalactiae
MIIKRNDMAPSVKAGDAILFYRLSQTYKVEEAVVYEDSKTSITKVGRIIAQAGDEVDLTEQGELKINGHIQNEGLTFIKSREANYPYRIADNSYLILNDYYSQESENYLQDAIAKDAIKGTINTLIRLRNH

SEQ ID NO: 50 - protein, 340 aa, Streptococcus agalactiae
MKLRHLLLTGAALTSFAATTVHGETVVNGAKLTVTKNLDLVNSNALIPNTDFTFKIEPDTTVNEDGNKFKGVALNTPMTKVTYTNSDKGGSNTKTAEFDFSEVTFEKPGVYYYKVTEEKIDKVPGVSYDTTSYTVQVHVLWNEEQQKPVATYIVGYKEGSKVPIQFKNSLDSTTLTVKKKVSGTGGDRSKDFNFGLTLKANQYYKASEKVMIEKTTKGGQAPVQTEASIDQLYHFTLKDGESIKVTNLPVGVDYVVTEDDYKSEKYTTNVEVSPQDGAVKNIAGNSTEQETSTDKDMTITFTNKKDFEVPTGVAMTVAPYIALGIVAVGGALYFVKKKNA

SEQ ID NO: 51 - protein, 237 aa, Streptococcus agalactiae
MIVRLIKLLDKLINVIVLCFFFLCLLIAALGIYDALTVYQGANATNYQQYKKKGVQFDDLLAINSDVMAWLTVKGTHIDYPIVQGENNLEYINKSVEGEYSLSGSVFLDYRNKVTFEDKYSLIYAHHMAGNVMFGELPNFRKKSFFNKHKEFSIETKTKQKLKINIFACIQTDAFDSLLFNPIDVDISSKNEFLNHIKQKSVQYREILTTNESRFVALSTCEDMTTDGRIIVIGQIE

SEQ ID NO: 52 - protein, 215 aa, Streptococcus agalactiae
MKKSILRILAIGYLLMSFCLLDSVEAENLTASINIEVINQVDVATNKQSSDIDETFMFVIEALDKESPLPNSVTTSVKGNGKTSFEQLTFSEVGQYHYKIHQLLGKNSQYHYDETVYEVVIYVLYNEQSGALETNLVSNKLGETEKSELIFKQEYSEKTPEPHQPDTTEKEKPQKKRNGILPSTGEMVSYVSALGIVLVATITLYSIYKKLKTSK

SEQ ID NO: 53 - protein, 450 aa, Streptococcus agalactiae
MTRTNYQKKRMTCPVETEDITYRRKKIKGRRQAILAQFEPELVHHELIGDSCTCPDCHGTLTEIGSVVQRQELVFIPAQLKRINHVQHAYKCQTCSDNSLSDKIIKAPVPKAPLAHSLGSASIIAHTVHQKFTLKVPNYRQEEDWNKLGLSISRKEIANWHIKSSQYYFEPLYDLLRDILLSQEVIHADETSYRVLESDTQLTYYWTFLSGKHEKKGITLYHHDKRRSGLVTQEVLGDYSGYVHCDMHGAYRQLEHAKLVGCWAHVRRKFFEATPKQADKTSLGRKGLVYCDKLFALEAEWCELPPQERLVKRKEILTPLMTTFFDWCREQVVLSGSKLGLAIAYSLKHERTFRTVLEDGHIVLSNNMAERAIKSLVMGRKNWLFSQSFEGAKAAAIIMSLLETAKRHGLNSEKYISYLLDRLPNEETLAKREVLEAYLPWAKKVQTNCQ

SEQ ID NO: 54 - protein, 116 aa, Streptococcus agalactiae
MTIRLNDLGQVYLVCGKTDMRQGIDSLAYLVKSQHELDLFSGAVYLFCGGRRDRFKALYWDGQGFWLLYKRFENGKLAWPRNRDEVKCLTAVQVDWLMKGFFISPNIKISKSHDFY

SEQ ID NO: 55 - protein, 251 aa, Streptococcus agalactiae
MECYRDRQLLSTYHKQVTQKKPSEMEEVWQKAKAYNARLGIQPVPDAFSFRDGIHDKNYESLLQIENNDIMGYVEVPSIKVTLPIYHYTTDEVLTKGAGHLFGSALPVGGDGTHTVISAHRGLPSAEMFTNLNLVKKGDTFYFRVLNKVLAYKVDQILTVEPDQVTSLSGVMGKDYATLVTCTPYGVNTKRLLVRGHRIAYHYKKYQQAKKAMKLVDKSRMWAEVVCAAFGVVIAIILVFMYSRVSAKKSK

SEQ ID NO: 56 - protein, 511 aa, Streptococcus agalactiae
MPYVKKKKDSFLVETYLEQSIRDKSELVLLLFKSPTIIFSHVAKQTGLTAVQLKYYCKELDDFFGNNLDITIKKGKIICCFVKPVKEFYLHQLYDTSTILKLLVFFIKNGTSSQPLIKFSKKYFLSSSSAYRLRESLIKLLREFGLRVSKNTIVGEEYRIRYLIAMLYSKFGIVIYPLDHLDNQIIYRFLSQSATNLRTSPWLEEPFSFYNMLLALSWKRHQFAVSIPQTRIFRQLKKLFIYDCLTRSSRQVIENAFSLTFSQGDLEYLFLIYITTNNSFASLQWTPQHIETCCHIFEKNDTFRLLLEPILKRLPQLNHSKQDLIKALMYFSKSFLFNLQHFVIEIPSFSLPTYTGNSNLYKALKNIVNQWLAQLPGKRHLNEKHLQLFCSHIEQILKNKQPALTVVLISSNFINAKLLTDTIPRYFSDKGIHFYSFYLLRDDIYQIPSLKPDLVITHSRLIPFVKNDLVKGVTVAEFSFDNPDYSIASIQNLIYQLKDKKYQDFLNEQLQ

SEQ ID NO: 57 - protein, 744 aa, Streptococcus agalactiae
MQKRDKTNYGSANNKRRQTTIGLLKVFLTFVALIGIVGFSIRAFGAEEQSVPNKQSSVQDYPWYGYDSYSKGYPDYSPLKTYHNLKVNLDGSKEYQAYCFNLTKHFPSKSDSVRSQWYKKLEGTNENFIKLADKPRIEDGQLQQNILRILYNGYPNDRNGIMKGIDPLNAILVTQNAIWYYTDSSYISDTSKAFQQEETDLKLDSQQLQLMRNALKRLINPKEVESLPNQVPANYQLSIFQSSDKTFQNLLSAEYVPDTPPKPGEEPPAKTEKTSVIIRKYAEGDYSKLLEGATLKLAQIEGSGFQEKIFDSNKSGEKVELPNGTYVLSELKPPQGYGVATPITFKVAAEKVLIKNKEGQFVENQNKEIAEPYSVTAFNDFEEIGYLSDFNNYGKFYYAKNTNGTNQVVYCFNADLHSPPDSYDHGANIDPDVSESKEIKYTHVSGYDLYKYAATPRDKDADFFLKHIKKILDKGYKKKGDTYKTLTEAQFRAATQLAIYYYTDSADLTTLKTYNDNKGYHGFDKLDDATLAVVHELITYAEDVTLPMTQNLDFFVPNSSRYQALIGTQYHPNELIDVISMEDKQAPIIPITHKLTISKTVTGTIADKKKEFNFEIHLKSSDGQAISGTYPTNSGELTVTDGKATFTLKDGESLIVEGLPSGYSYEITETGASDYEVSVNGKNAPDGKATKASVKEDETVAFENRKDLVPPTGLTTDGAIYLWLLLLVPFGLLVWLFGRKGTKK

SEQ ID NO: 58 - protein, 173 aa, Streptococcus agalactiae
MTNYLNRLNENPLLKAFIRLVLKISIIGFLGYILFQYVFGVMIVNTNQMSPAVSAGDGVLYYRLTDRYHINDVVVYEVDDTLKVGRIAAQAGDEVNFTQEGGLLINGHPPEKEVPYLTYPHSSGPNFPYKVPTGTYFILNDYREERLDSRYYGALPINQIKGKISTLLRVRGI

SEQ ID NO: 59 - protein, 344 aa, Streptococcus agalactiae
MKKNKLLLATAILATALGTASLNQNVKAETAGVSENAKLIVKKTFDSYTDNEVLMPKADYTFKVEADSTASGKTKDGLEIKPGIVNGLTEQIISYTNTDKPDSKVKSTEFDFSKVVFPGIGVYRYTVSEKQGDVEGITYDTKKWTVDVYVGNKEGGGFEPKFIVSKEQGTDVKKPVNFNNSFATTSLKVKKNVSGNTGELQKEFDFTLTLNESTNFKKDQIVSLQKGNEKFEVKIGTPYKFKLKNGESIQLDKLPVGITYKVNEMEANKDGYKTTASLKEGDGQSKMYQLDMEQKTDESADEIVVTNKRDTQVPTGVVGTLAPFAVLSIVAIGGVIYITKRKKA

SEQ ID NO: 60 - protein, 239 aa, Streptococcus agalactiae
MTIVQVINKAIDTLILIFCLVVLFLAGFGLWDSYHLYQQADASNFKKFKTAQQQPKFEDLLALNEDVIGWLNIPGTHIDYPLVQGKTNLEYINKAVDGSVAMSGSLFLDTRNHNDFTDDYSLIYGHHMAGNAMFGEIPKFLKKDFFSKHNKAIIETKERKKLTVTIFACLKTDAFNQLVFNPNAITNQDQQRQLVDYISKRSKQFKPVKLKHHTKFVAFSTCENFSTDNRVIVVGTIQE

SEQ ID NO: 61 - protein, 183 aa, Streptococcus agalactiae
MILTMLAFNQTVLAKDSTVQTSISVENVLERAGDSTPFSIALESIDAMKTIEEITIAGSGKASFSPLTFTTVGQYTYRVYQKPSQNKDYQADTTVFDVLVYVTYDEDGTLVAKVISRRAGDEEKSAITFKPKWLVKPIPPRQPNIPKTPLPLAGEVKSLLGILSIVLLGLLVLLYVKKLKSRL

SEQ ID NO: 62 - protein, 401 aa, Streptococcus agalactiae
MVRFDLKHVQTLHSLSQLPISVMSQDKALIQVYGNDDYLLCYYQFLKHLAIPQAAQDVIFYEGLFEESFMIFPLCHYIIAIGPFYPYSLNKDYQEQLANNCLKHSSHRSKEELLSYMALVPHFPINNVRNLLIAIDAFFDTQFETTCQQTIHQLLQHSKQMTADPDIIHRLKHISKASSQLPPVLEHLNHIMDLVKLGNPQLLKQEINRIPLSSITSSSISALRAEKNLTVIYLTRLLEFSFVENTDVAKHYSLVKYYMALNEEASDLLKVLRIRCAAIIHFSESLTNKSISDKRQMYNSVLHYVDSHLYSKLKVSDIAKRLYVSESHLRSVFKKYSNVSLQHYILSTKIKEAQLLLKRGIPVGEVAKSLYFYDTTHFHKIFKKYTGISSKDYLAKYRDNI

SEQ ID NO: 63 - protein, 656 aa, Streptococcus agalactiae
MSSSDEETLKQYASKYTSNRRGDTSGNLKKQIAKVLTEGYPTNKSDWLNGLTENEKIEVTQDAIWYFTETTVPADRSYTNRNVNSQKMKEVYQKLIDTTDIDKYEDVQFDLFVPQDTNLQAVISVEPVIESLPWTSLKPIAQKDITAKKIWVDAPKEKPIIYFKLYRQLPGEKEVAVDDAELKQINSEGQQEISVTWTNQLVTDEKGMAYIYSVKEVDKNGELLEPKDYIKKEDGLTVTNTYVKPTSGHYDIEVTFGNGHIDITEDTTPDIVSGENQMKQIEGEDSKPIDEVTENNLIEFGKNTMPGEEDGTNSNKYEEVEDSRPVDTLSGLSSEQGQSGDMTIEEDSATHIKFSKRDIDGKELAGATMELRDSSGKTISTWISDGQVKDFYLMPGKYTFVETAAPDGYEVATAITFTVNEQGQVTVNGKATKGDAHIVMVDAYKPTKGSGQVIDIEEKLPDEQGHSGSTTEIEDSKSSDVIIGGQGEVVDTTEDTQSGMTGHSGSTTEIEDSKSSDVIIGGQGEVVDTTEDTQSGMTGHSGSTTKIEDSKSSDVIVGGQGQIVETTEDTQTGMHGDSGRKTEVEDTKLVQSFHFDNKEPESNSEIPKKDKSKSNTSLPATGEKQHNKFFWMVTSCSLISSVFVISLKSKKRLSSC

SEQ ID NO: 64 - protein, 511 aa, Streptococcus agalactiae; identical to SEQ ID NO: 56

SEQ ID NO: 65 - protein, 744 aa, Streptococcus agalactiae; identical to SEQ ID NO: 57

SEQ ID NO: 66 - protein, 173 aa, Streptococcus agalactiae; identical to SEQ ID NO: 58

SEQ ID NO: 67 - protein, 349 aa, Streptococcus agalactiae
MEREKMKKNKLLLATAILATALGTASLNQNVKAETAGVSENAKLIVKKTFDSYTDNEVLMPKADYTFKVEADSTASGKTKDGLEIKPGIVNGLTEQIISYTNTDKPDSKVKSTEFDFSKVVFPGIGVYRYTVSEKQGDVEGITYDTKKWTVDVYVGNKEGGGFEPKFIVSKEQGTDVKKPVNFNNSFATTSLKVKKNVSGNTGELQKEFDFTLTLNESTNFKKDQIVSLQKGNEKFEVKIGTPYKFKLKNGESIQLDKLPVGITYKVNEMEANKDGYKTTASLKEGDGQSKMYQLDMEQKTDESADEIVVTNKRDTQVPTGVVGTLAPFAVLSIVAIGGVIYITKRKKA

SEQ ID NO: 68 - protein, 241 aa, Streptococcus agalactiae
MVMTIVQVINKAIDTLILIFCLVVLFLAGFGLWDSYHLYQQADASNFKKFKTAQQQPKFEDLLALNEDVIGWLNIPGTHIDYPLVQGKTNLEYINKAVDGSVAMSGSLFLDTRNHNDFTDDYSLIYGHHMAGNAMFGEIPKFLKKDFFSKHNKAIIETKERKKLTVTIFACLKTDAFNQLVFNPNAITNQDQQRQLVDYISKRSKQFKPVKLKHHTKFVAFSTCENFSTDNRVIVVGTIQE

SEQ ID NO: 69 - protein, 189 aa, Streptococcus agalactiae
MLFSVVMILTMLAFNQTVLAKDSTVQTSISVENVLERAGDSTPFSIALESIDAMKTIEEITIAGSGKASFSPLTFTTVGQYTYRVYQKPSQNKDYQADTTVFDVLVYVTYDEDGTLVAKVISRRAGDEEKSAITFKPKWLVKPIPPRQPNIPKTPLPLAGEVKSLLGILSIVLLGLLVLLYVKKLKSRL

SEQ ID NO: 70 - protein, 285 aa, Streptococcus agalactiae
MALVPHFPINNVRNLLIAIDAFFDTQFETTCQQTIHQLLQHSKQMTADPDIIHRLKHISKASSQLPPVLEHLNHIMDLVKLGNPQLLKQEINRIPLSSITSSSISALRAEKNLTVIYLTRLLEFSFVENTDVAKHYSLVKYYMALNEEASDLLKVLRIRCAAIIHFSESLTNKSISDKRQMYNSVLHYVDSHLYSKLKVSDIAKRLYVSESHLRSVFKKYSNVSLQHYILSTKIKEAQLLLKRGIPVGEVAKSLYFYDTTHFHKIFKKYTGISSKDYLAKYRDNI

SEQ ID NO: 71 - protein, 733 aa, Streptococcus agalactiae
MTQKNSYKLSFLLSLTGFILGLLLVFIGLSGVSVGHAETRNGANKQGAFEIKKNKSQEEYNYEVYDNRNILQDGEHKLEIKRVDGTGKTYQGFCFQLTKNFPTAQGVSKKLYKKLSSSDEETLKQYASKYTSNRRGDTSGNLKKQIAKVLTEGYPTNKSDWLNGLTENEKIEVTQDAIWYFTETTVPADRSYTNRNVNSQKMKEVYQKLIDTTDIDKYEDVQFDLFVPQDTNLQAVISVEPVIESLPWTSLKPIAQKDITAKKIWVDAPKEKPIIYFKLYRQLPGEKEVAVDDAELKQINSEGQQEISVTWTNQLVTDEKGMAYIYSVKEVDKNGELLEPKDYIKKEDGLTVTNTYVKPTSGHYDIEVTFGNGHIDITEDTTPDIVSGENQMKQIEGEDSKPIDEVTENNLIEFGKNTMPGEEDGTNSNKYEEVEDSRPVDTLSGLSSEQGQSGDMTIEEDSATHIKFSKRDIDGKELAGATMELRDSSGKTISTWISDGQVKDFYLMPGKYTFVETAAPDGYEVATAITFTVNEQGQVTVNGKATKGDAHIVMVDAYKPTKGSGQVIDIEEKLPDEQGHSGSTTEIEDSKSSDVIIGGQGEVVDTTEDTQSGMTGHSGSTTKIEDSKSSDVIVGGQGQIVETTEDTQTGMHGDSGRKTEVEDTKLVQSFHFDNKEPESNSEIPKKDKSKSNTSLPATGEKQHNKFFWMVTSCSLISSVFVISLKSKKRLSSC

SEQ ID NO: 72 - protein, 217 aa, Streptococcus agalactiae
MPYVKKKKDSFLVETYLEQSIRDKSELVLLLFKSPTIIFSHVAKQTGLTAVQLKYYCKELDDFFGNNLDITIKKGKIICCFVKPVKEFYLHQLYDTSTILKLLVFFIKNGTTSQPLIKFSKKYFLSSSSAYRLRESLIKLLREFGLRVSKNTIVGEEYRIRYLIAMLYSKFGIVIYPLDHLDNQIIYRFLSQSATNLRTSPWLEEPFSFYNMLLALS

SEQ ID NO: 73 - protein, 524 aa, Streptococcus agalactiae
MQKRDKTNYGSANNKRRQTTIGLLKVFLTFVALIGIVGFSIRAFGAEEQSTETKKTSVIIRKYAEGDYSKLLEGATLKLAQIEGSGFQEQSFESSTSGQKLQLSDGTYILTETKSPQGYEIAEPITFKVTAGKVFIKGKDGQFVENQNKEVAEPYSVTAYNDFDDSGFINPKTFTPYGKFYYAKNANGTSQVVYCFNVDLHSPPDSLDKGETIDPDFNEGKEIKYTHILGADLFSYANNPRASTNDELLSQVKKVLEKGYRDDSTTYANLTSVEFRAATQLAIYYFTDSVDLDNLADYHGFGALTTEALNATKEIVAYAEDRANLPNISNLDFYVPNSNKYQSLIGTQYHPESLVDIIRMEDKQAPIIPITHKLTISKTVTGTIADKKKEFNFEIHLKSSDGQAISGTYPTNSGELTVTDGKATFTLKDGESLIVEGLPSGYSYEITETGASDYEVSVNGKNAPDGKATKASVKEDETITFENRKDLVPPTGLTTDGAIYLWLLLLVLLGLWVWLIGRKGLKND

SEQ ID NO: 74 - protein, 173 aa, Streptococcus agalactiae
MTNYLNRLNENPLFKAFIRLVLKISIIGFLGYILFQYIFGVMIINTNVMSPALSAGDGILYYRLTDRYHINDVVVYEVDNTLKVGRIVAQAGDEVSFTQEGGLLINGHPPEKEVPYLTYPHSSGPNFPYKVPTGTYFILNDYREERLDSRYYGALPINQIKGKISTLLRVRGI

SEQ ID NO: 75 - protein, 344 aa, Streptococcus agalactiae
MKKNKLLLATAILATALGTASLNQNVKAETAGVIDGSTLVVKKTFPSYTDDKVLMPKADYTFKVEADDNAKGKTKDGLDIKPGVIDGLENTKTIHYGNSDKTTAKEKSVNFDFANVKFPGVGVYRYTVSEVNGNKAGIAYDSQQWTVDVYVVNREDGGFEAKYIVSTEGGQSDKKPVLFKNFFDTTSLKVTKKVTGNTGEHQRSFSFTLLLTPNECFEKGQVVNILQGGETKKVVIGEEYSFTLKDKESVTLSQLPVGIEYKVTEEDVTKDGYKTSATLKDGDVTDGYNLGDSKTTDKSTDEIVVTNKRDTQVPTGVVGTLAPFAVLSIVAIGGVIYITKRKKA

SEQ ID NO: 76 - protein, 246 aa, Streptococcus agalactiae
MISQRMMMTIVQVINKAIDTLILIFCLVVLFLAGFGLWDSYHLYQQADASNFKKFKTAQQQPKFEDLLALNEDVIGWLNIPGTHMDYPLVQGKTNLEYINKAVDGSVAMSGSLFLDTRNHNDFTDDYSLIYGHHMAGNAMFGEIPKFLKKDFFNKHNKAIIETKERKKLTVTIFACLKTDAFDQLVFNPNAITNQDQQRQLVDYISKRSKQFKPVKLKHHTKFVAFSTCENFSTDNRVIVVGTIQE

SEQ ID NO: 77 - protein, 195 aa, Streptococcus agalactiae
MRKYWKMLFSVVMILTMLAFNQTVLAKDSTVQTSISVENVLERAGDSTSFSVALESIDAMKTIDEITIAGSGKASFSPLTFTTVGQYTYRVYQKPSQNKDYQADTTVFDVLVYVTYDEDGTLVAKVISRRAGDEEKSAITFKPKRLVKPIPPRQPDIPKTPLPLAGEVKSLLGILSIVLLGLLVLLYVKKLKSRL

SEQ ID NO: 78 - protein, 401 aa, Streptococcus agalactiae
MAIFDLKHVQTLHSLSQLPISVMSQDKALIQVYGNDDYLLCYYQFLKHLAIPQAAQDVIFYEGLFEESFMIFPLCHYIIAIGPFYPYSLNKDYQEQLANNCLKHSSHRSKEELLSYMALVPHFPINNVRNLLIAIDAFFDTQFETTCQQTIHQLLQHSKQMTADPDIIHRLKHISKASSQLPPVLEHLNHIMDLVKLGNPQLLKQEINRIPLSSITSSSISALRAEKNLTVIYLTRLLEFSFVENTDVAKHYSLVKYYMALNEEASDLLKVLRIRCAAIIHFSESLTNKSISDKRQMYNSVLHYVDSHLYSKLKVSDIAKRLYVSESHLRSVFKKYSNVSLQHYILSTKIKEAQLLLKRGIPVGEVAKSLYFYDTTHFHKIFKKYTGISSKDYLAKYRDNI

SEQ ID NO: 79 - protein, 696 aa, Streptococcus agalactiae
MTQKNSYKLSFLLSLTGFILGLLLVFIGLSGVSVGHAETRNGANKQGAFEIKKNKSQEEYNYEVYDNRNILQDGEHKLEIKRVDGTGKTYQGFCFQLTKNFPTAQGVSKKLYKKLSSSDEETLKQYASKYTSNRRGDTSGNLKKQIAKVLTEGYPTNKSDWLNGLTENEKIEVTQDAIWYFTETTVPADRSYTNRNVNSQKMKEVYQKLIDTTDIDKYEDVQFDLFVPQDTNLQAVISVEPVIESLPWTSLKPIAQKDITAKKIWVDAPKEKPIIYFKLYRQLPGEKEVAVDDAELKQINSEGQQEISVTWTNQLVTDEKGMAYIYSVKEVDKNGELLEPKDYIKKEDGLTVTNTYVKPTSGHYDIEVTFGNGHIDITEDTTPDIVSGENQMKQIEGEDSKPIDEVTENNLIEFGKNTMPGEEDGTNSNKYEEVEDSRPVDTLSGLSSEQGQSGDMTIEEDSATHIKFSKRDIDGKELAGATMELRDSSGKTISTWISDGQVKDFYLMPGKYTFVETAAPDGYEIATAITFTVNEQGQVTVNGKATKGDAHIVMVDAYKPTKGSGQVIDIEEKLPDEQGHSGSTTEIEDSKSSDVIIGGQGQIVETTEDTQTGMHGDSGCKTEVEDTKLVQSFHFDNKESESNSEIPKKDKPKSNTSLPATGEKQHNMFFWMVTSCSLISSVFVISLKTKKRLSSC

SEQ ID NO: 80 - protein, 283 aa, Streptococcus pneumoniae
MSRTKLRALLGYLLMLVACLIPIYCFGQMVLQSLGQVKGHATFVKSMTTEMYQEQQNHSLAYNQRLASQNRIVDPFLAEGYEVNYQVSDDPDAVYGYLSIPSLEIMEPVYLGADYHHLGMGLAHVDGTPLPLDGTGIRSVIAGHRAEPSHVFFRHLDQLKVGDALYYDNGQEIVEYQMMDTEIILPSEWEKLESVSSKNIMTLITCDPIPTFNKRLLVNFERVAVYQKSDPQTAAVARVAFTKEGQSVSRVATSQWLYRGLVVLAFLGILFVLWKLARLLRGK

SEQ ID NO: 81 - protein, 261 aa, Streptococcus pneumoniae
MSRYYYRIESNEVIKEFDETVSQMDKAELEERWRLAQAFNATLKPSEILDPFTEQEKKKGVSEYANMLKVHERIGYVEIPAIDQEIPMYVGTSEDILQKGAGLLEGASLPVGGENTHTVITAHRGLPTAELFSQLDKMKKGDIFYLHVLDQVLAYQVDQIVTVEPNDFEPVLIQHGEDYATLLTCTPYMINSHRLLVRGKRIPYTAPIAERNRAVRERGQFWLWLLLGAMAVILLLLYRVYRNRRIVKGLEKQLEGRHVKD

SEQ ID NO: 82 - protein, 279 aa, Streptococcus pneumoniae
MAVMAYPLVSRLYYRVESNQQIADFDKEKATLDEADIDERMKLAQAFNDSLNNVVSGDPWSEEMKKKGRAEYARMLEIHERMGHVEIPVIDVDLPVYAGTAEEVLQQGAGHLEGTSLPIGGNSTHAVITAHTGLPTAKMFTDLTKLKVGDKFYVHNIKEVMAYQVDQVKVIEPTNFDDLLIVPGHDYVTLLTCTPYMINTHRLLVRGHRIPYVAEVEEEFIAANKLSHLYRYLFYVAVGLIVILLWIIRRLRKKKKQPEKALKALKAARKEVKVEDGQQ

SEQ ID NO: 83 - protein, 43 aa, Streptococcus pneumoniae
MFLPFLSASLYLQTHHFIAFPNRQSYLLRETRKSHFFLIHHPF

SEQ ID NO: 84 - protein, 393 aa, Streptococcus pneumoniae
MISRIFFVMALCFSLVWGAHAVQAQEDHTLVLQLENYQEVVSQLPSRDGHRLQVWKLDDSYSYDDRVQIVRDLHSWDENKLSSFKKTSFEMTFLENQIEVSHIPNGLYYVRSIIQTDAVSYPAEFLFEMTDQTVEPLVIVAKKTDTMTTKVKLIKVDQDHNRLEGVGFKLVSVARDVSEKEVPLIGEYRYSSSGQVGRTLYTDKNGEIFVTNLPLGNYRFKEVEPLAGYAVTTLDTDVQLVDHQLVTITVVNQKLPRGNVDFMKVDGRTNTSLQGAMFKVMKEESGHYTPVLQNGKEVVVTSGKDGRFRVEGLEYGTYYLWELQAPTGYVQLTSPVSFTIGKDTRKELVTVVKNNKRPRIDVPDTGEETLYILMLVAILLFGSGYYLTKKPNN

SEQ ID NO: 85 - protein, 665 aa, Streptococcus pneumoniae
MKSINKFLTMLAALLLTASSLFSAATVFAAGTTTTSVTVHKLLATDGDMDKIANELETGNYAGNKVGVLPANAKEIAGVMFVWTNTNNEIIDENGQTLGVNIDPQTFKLSGAMPATAMKKLTEAEGAKFNTANLPAAKYKIYEIHSLSTYVGEDGATLTGSKAVPIEIELPLNDVVDAHVYPKNTEAKPKIDKDFKGKANPDTPRVDKDTPVNHQVGDVVEYEIVTKIPALANYATANWSDRMTEGLAFNKGTVKVTVDDVALEAGDYALTEVATGFDLKLTDAGLAKVNDQNAEKTVKITYSATLNDKAIVEVPESNDVTFNYGNNPDHGNTPKPNKPNENGDLTLTKTWVDATGAPIPAGAEATFDLVNAQTGKVVQTVTLTTDKNTVTVNGLDKNTEYKFVERSIKGYSADYQEITTAGEIAVKNWKDENPKPLDPTEPKVVTYGKKFVKVNDKDNRLAGAEFVIANADNAGQYLARKADKVSQEEKQLVVTTKDALDRAVAAYNALTAQQQTQQEKEKVDKAQAAYNAAVIAANNAFEWVADKDNENVVKLVSDAQGRFEITGLLAGTYYLEETKQPAGYALLTSRQKFEVTATSYSATGQGIEYTAGSGKDDATKVVNKKITIPQTGGIGTIIFAVAGAAIMGIAVYAYVKNNKDEDQLA

SEQ ID NO: 86 - protein, 893 aa, Streptococcus pneumoniae
MLNRETHMKKVRKIFQKAVAGLCCISQLTAFSSIVALAETPETSPAIGKVVIKETGEGGALLGDAVFELKNNTDGTTVSQRTEAQTGEAIFSNIKPGTYTLTEAQPPVGYKPSTKQWTVEVEKNGRTTVQGEQVENREEALSDQYPQTGTYPDVQTPYQIIKVDGSEKNGQHKALNPNPYERVIPEGTLSKRIYQVNNLDDNQYGIELTVSGKTVYEQKDKSVPLDVVILLDNSNSMSNIRNKNARRAERAGEATRSLIDKITSDSENRVALVTYASTIFDGTEFTVEKGVADKNGKRLNDSLFWNYDQTSFTTNTKDYSYLKLTNDKNDIVELKNKVPTEAEDHDGNRLMYQFGATFTQKALMKADEILTQQARQNSQKVIFHITDGVPTMSYPINFNHATFAPSYQNQLNAFFSKSPNKDGILLSDFITQATSGEHTIVRGDGQSYQMFTDKTVYEKGAPAAFPVKPEKYSEMKAAGYAVIGDPINGGYIWLNWRESILAYPFNSNTAKITNHGDPTRWYYNGNIAPDGYDVFTVGIGINGDPGTDEATATSFMQSISSKPENYTNVTDTTKILEQLNRYFHTIVTEKKSIENGTITDPMGELIDLQLGTDGRFDPADYTLTANDGSRLENGQAVGGPQNDGGLLKNAKVLYDTTEKRIRVTGLYLGTDEKVTLTYNVRLNDEFVSNKFYDTNGRTTLHPKEVEQNTVRDFPIPKIRDVRKYPEITISKEKKLGDIEFIKVNKNDKKPLRGAVFSLQKQHPDYPDIYGAIDQNGTYQNVRTGEDGKLTFKNLSDGKYRLFENSEPAGYKPVQNKPIVAFQIVNGEVRDVTSIVPQDIPAGYEFTNDKHYITNEPIPPKREYPRTGGIGMLPFYLIGCMMMGGVLLYTRKHP

SEQ ID NO: 87 - protein, 509 aa, Streptococcus pneumoniae
MLNKYIEKRITDKITILNILLDIRSIELDELSTLTSLQSKSLLSILQELQETFEEELTFNLDTQQVQLIEHHSHQTNYYFHQLYNQSTILKILRFFLLQGNQSFNEFTQKEYISIATGYRVRQKCGLLLRSVGLDLVKNQVVGPEYRIRFLIALLQFHFGIEIYDLNDGSMDWVTHMIVQSNSQLSHELLEITPDEYVHFSILVALTWKRREFPLEFPESKEFEKLKNLFMYPILMEHCQTYLEPHANMTFTQEELDYIFLVYCSANSSFSKDKWNQEKKTHTIQLILQHTRGKHLLSKFKNILGNDISNSLSFLTALTFLTRTFLFGLQNLVPYYNYYEHYGIESDKPLYHISKAIVQEWMTEQKIEGVIDQHRLYLFSLYLTETIFSSLPAIPIFIILNNQADVNLIKSIILRNFTDKVASVTGYNILISPPPSEEHLTEPLIIITTKEYLPYVKKQYPKGKHHFLTIALDLHVSQQRLIYQTIVDIRKEAFDKRVAMIAKKAHYLL

SEQ ID NO: 88 - DNA, 1533 bp, Streptococcus agalactiae
atgccttatgtcaaaaagaaaaaggatagtttcttagtagaaacatatcttgaacagtctattagagataaaagtgaattagtcttactgttatttaaatcgcctactatcattttttctcatgttgctaaacaaactggtctgacggctgtacaattaaaatattactgtaaagaacttgatgacttttttggaaataatttagacattaccattaaaaagggcaaaataatatgttgttttgtcaaacctgttaaggaattctaccttcatcaactctatgacacatcaacaatattaaaattattagttttctttattaaaaatggaacgtcatcacaacctctgattaaattttcaaaaaagtattttctatcaagctcctcagcttatcgactacgggaatcgctgatcaaattactacgggaatttggcttgagagtctcaaaaaatacaattgtcggagaggaatatcgtattcgctatcttattgccatgctatatagtaaatttggcattgtcatctatccgttagatcatctagacaatcaaattatttatcgcttcttatcacaaagtgcaaccaatttaagaacatcgccctggctagaggaacctttttctttttataatatgttacttgccttgtcatggaaacgtcaccaatttgcagttagcattcctcaaacacgtatttttcgacaattaaaaaagctttttatctatgattgtttaactcgaagcagtcgacaagtaatcgaaaatgctttttcgttaatgttctcacaaggagatctcgattatctttttttaatttatattaccaccaataattcctttgccagcctacaatggactccacagcatattgaaacttgctgccatatttttgaaaaaaatgacacatttcggttattgttagagcccattcttaaacgtttaccgcaattaaaccattctaaacaagaccttattaaagcccttatgtatttttcaaaatcttttctatttaacctccaacatttcgtcatcgagattccttctttttccttgccgacctatacaggcaactctaatctttacaaagctttaaaaaatattgtaaatcagtggcttgctcaattacccggaaagcgtcatcttaacgaaaagcatctccaacttttttgctctcatattgaacaaatcttaaaaaataaacaacctgctttaactgtcgttttaatatctagtaactttataaatgctaaactccttacagatactatcccacgatatttttctgataaaggaattcatttttattctttttacttattaagagatgatatctatcaaattccaagcttaaaaccagatttagttatcactcatagccgattaattccttttgttaagaatgatctggtcaaaggtgttactgttgctgaattttcttttgataaccctgactactctattgcttcaattcaaaacttgatatatcagctcaaagataaaaaatatcaagattttctaaacgagcaattacaa

SEQ ID NO: 89 - protein, 511 aa, Streptococcus agalactiae
MPYVKKKKDSFLVETYLEQSIRDKSELVLLLFKSPTIIFSHVAKQTGLTAVQLKYYCKELDDFFGNNLDITIKKGKIICCFVKPVKEFYLHQLYDTSTILKLLVFFIKNGTSSQPLIKFSKKYFLSSSSAYRLRESLIKLLREFGLRVSKNTIVGEEYRIRYLIAMLYSKFGIVIYPLDHLDNQIIYRFLSQSATNLRTSPWLEEPFSFYNMLLALSWKRHQFAVSIPQTRIFRQLKKLFIYDCLTRSSRQVIENAFSLMFSQGDLDYLFLIYITTNNSFASLQWTPQHIETCCHIFEKNDTFRLLLEPILKRLPQLNHSKQDLIKALMYFSKSFLFNLQHFVIEIPSFSLPTYTGNSNLYKALKNIVNQWLAQLPGKRHLNEKHLQLFCSHIEQILKNKQPALTVVLISSNFINAKLLTDTIPRYFSDKGIHFYSFYLLRDDIYQIPSLKPDLVITHSRLIPFVKNDLVKGVTVAEFSFDNPDYSIASIQNLIYQLKDKKYQDFLNEQLQ

SEQ ID NO: 90 - DNA, 1569 bp, Streptococcus agalactiae
ttgcaaaagagggataaaaccaattatggaagcgctaacaacaaacgacgacaaacgacgatcggattactgaaagtatttttgacgtttgtagctctgataggaatagtagggttttctatcagagcgttcggagctgaagaaaaatctactgaaactaaaaaaacgtcagtcattattagaaaatatgctgaaggtgactactctaaacttctagagggagcaactttgcgtttaacaggggaagatatcccagattttcaagaaaaagtcttccaaagtaatggaacaggagaaaagattgaattatcaaatgggacttataccttaacagaaacatcatctccagatggatataaaattacggagccgattaagtttagagtagtgaataaaaaagtatttatcgtccaaaaagatggttctcaagtggaaaacccaaacaaagaactaggttctccatatactatagaggcatacaatgattttgatgaatttggcttactgtcaacacaaaattatgcgaaattttattatggaaaaaactatgatggcagttcacaaattgtttattgcttcaatgccaacttgaaatctccacctgactcggaagatcatggtgctacaataaatcctgactttacgactggtgatattaggtacagtcatattgctggttcagatttgataaaatacgctaatacagctagggatgaagatcctcaattatttttaaaacacgtaaaaaaagtaattgaaaatgggtatcataaaaaaggtcaagctattccatataacggtctgactgaggcacagtttcgtgcggctactcaactggcaatttattattttacagatagtgttgacttaactaaggatagattgaaagacttccatggatttggagatatgaatgatcaaactttgggtgtagctaaaaaaattgtagaatacgctttgagtgatgaagattcaaaactaacaaatcttgatttcttcgtacctaataatagcaaataccaatctcttattgggacagaataccatccagatgatttggttgacgtgattcgtatggaagataaaaagcaagaagttattccagtaactcatagtttgacggtgcaaaaaacagtagtcggtgagttgggagataagactaaaggctttcaatttgaacttgagttgaaagataaaactggacagcctattgttaacactctaaaaactaataatcaagatttagtagctaaagatgggaaatattcatttaatctaaagcatggtgacaccataagaatagaaggattaccgacgggatattcttataccctgaaagagactgaagctaaggattatatagtaactgttgataacaaagttagtcaagaagctcaatcagcaagtgagaatgtcacagcagacaaagaagtcacttttgaaaaccgaaaagatcttgtcccaccaactggtttgacaacagatggggctatctatctttggttattactacttgttccatttgggttattggtttggctatttggtcgtaaagggttaaaaaatgac

SEQ ID NO: 91 - protein, 523 aa, Streptococcus agalactiae
MQKRDKTNYGSANNKRRQTTIGLLKVFLTFVALIGIVGFSIRAFGAEEKSTETKKTSVIIRKYAEGDYSKLLEGATLRLTGEDIPDFQEKVFQSNGTGEKIELSNGTYTLTETSSPDGYKITEPIKFRVVNKKVFIVQKDGSQVENPNKELGSPYTIEAYNDFDEFGLLSTQNYAKFYYGKNYDGSSQIVYCFNANLKSPPDSEDHGATINPDFTTGDIRYSHIAGSDLIKYANTARDEDPQLFLKHVKKVIENGYHKKGQAIPYNGLTEAQFRAATQLAIYYFTDSVDLTKDRLKDFHGFGDMNDQTLGVAKKIVEYALSDEDSKLTNLDFFVPNNSKYQSLIGTEYHPDDLVDVIRMEDKKQEVIPVTHSLTVQKTVVGELGDKTKGFQFELELKDKTGQPIVNTLKTNNQDLVAKDGKYSFNLKHGDTIRIEGLPTGYSYTLKETEAKDYIVTVDNKVSQEAQSASENVTADKEVTFENRKDLVPPTGLTTDGAIYLWLLLLVPFGLLVWLFGRKGLKND

SEQ ID NO: 92 - DNA, 519 bp, Streptococcus agalactiae
atgactaattacctaaatcgtttaaatgagaattcactatttaaagctttcatacggttagtacttaagatttctattattgggtttctaggttacattctatttcagtatgtttttggtgttatgattattaacactaatgatatgagtcctgctttaagtgcaggtgacggtgttttatattatcgtttgactgatcgctatcatattaatgatgtggtggtctatgaggttgataacactttgaaagttggtcgaattgtcgctcaagctggcgatgaggttagttttacgcaagaaggaggactgttgattaatgggcatccaccagaaaaagaggtcccttacctgacgtatcctcactcaagtggcccaaactttccctataaagttcctacgggtaagtatttcatattgaatgattatcgtgaagaacgtttggacagtcgttattatggggcgttacccgtcaatcaaataaaagggaaaatctcaactctattaagagtgagaggaatt

SEQ ID NO: 93 - protein, 173 aa, Streptococcus agalactiae
MTNYLNRLNENSLFKAFIRLVLKISIIGFLGYILFQYVFGVMIINTNDMSPALSAGDGVLYYRLTDRYHINDVVVYEVDNTLKVGRIVAQAGDEVSFTQEGGLLINGHPPEKEVPYLTYPHSSGPNFPYKVPTGKYFILNDYREERLDSRYYGALPVNQIKGKISTLLRVRGI

SEQ ID NO: 94 - DNA, 1056 bp, Streptococcus agalactiae
ttggagagagaaaaaatgaaaaaaaacaaattattacttgctactgcaatcttagcaactgctttaggaacagcttctttaaatcaaaacgtaaaagctgagacggcaggggttgtaacaggaaaatcactacaagttacaaagacaatgacttatgatgatgaagaggtgttaatgcccgaaaccgcctttacttttactatagagcctgatatgactgcaagtggaaaagaaggcagcctagatattaaaaatggaattgtagaaggcttagacaaacaagtaacagtaaaatataagaatacagataaaacatctcaaaaaactaaaatagcacaatttgatttttctaaggttaaatttccagctataggtgtttaccgctatatggtttcagagaaaaacgataaaaaagacggaattacgtacgatgataaaaagtggactgtagatgtttatgttgggaataaggccaataacgaagaaggtttcgaagttctatatattgtatcaaaagaaggtacttctagtactaaaaaaccaattgaatttacaaactctattaaaactacttccttaaaaattgaaaaacaaataactggcaatgcaggagatcgtaaaaaatcattcaacttcacattaacattacaaccaagtgaatattataaaactggatcagttgtgaaaatcgaacaggatggaagtaaaaaagatgtgacgataggaacgccttacaaatttactttgggacacggtaagagtgtcatgttatcgaaattaccaattggtatcaattactatcttagtgaagacgaagcgaataaagacggctacactacaacggcaacattaaaagaacaaggcaaagaaaagagttccgatttcactttgagtactcaaaaccagaaaacagacgaatctgctgacgaaatcgttgtcacaaataagcgtgacactcaagttccaactggtgttgtagggacccttgctccatttgcagttcttagcattgtggctattggtggagttatctatattacaaaacgtaaaaaagct

SEQ ID NO: 95 - protein, 352 aa, Streptococcus agalactiae
MEREKMKKNKLLLATAILATALGTASLNQNVKAETAGVVTGKSLQVTKTMTYDDEEVLMPETAFTFTIEPDMTASGKEGSLDIKNGIVEGLDKQVTVKYKNTDKTSQKTKIAQFDFSKVKFPAIGVYRYMVSEKNDKKDGITYDDKKWTVDVYVGNKANNEEGFEVLYIVSKEGTSSTKKPIEFTNSIKTTSLKIEKQITGNAGDRKKSFNFTLTLQPSEYYKTGSVVKIEQDGSKKDVTIGTPYKFTLGHGKSVMLSKLPIGINYYLSEDEANKDGYTTTATLKEQGKEKSSDFTLSTQNQKTDESADEIVVTNKRDTQVPTGVVGTLAPFAVLSIVAIGGVIYITKRKKA

SEQ ID NO: 96 - DNA, 738 bp, Streptococcus agalactiae
gtgattagtcaaagaatgatgatgacaattgtacaggttatcaataaagccattgatactctcattcttatcttttgtttagtcgtactatttttagctggttttggtttgtgggattcttatcatctctatcaacaagcagacgcttctaatttcaaaaaatttaaaacagctcaacaacagcctaaatttgaagacttgttagctttgaatgaggatgtcattggttggttaaatatcccagggactcatattgattatcctctagttcagggaaaaacgaatttagagtatattaataaagcagttgatggcagtgttgccatgtctggtagtttatttttagatacacggaatcataatgattttacggacgattactctctgatttatggccatcatatggcaggtaatgccatgtttggcgaaattccaaaatttttaaaaaaggattttttcaacaaacataataaagctatcattgaaacaaaagagagaaaaaaactaaccgtcactatttttgcttgtctcaagacagatgcctttgaccagttagtttttaatcctaatgctattaccaatcaagaccaacaaaagcagctcgttgattatatcagtaaaagatcaaaacaatttaaacctgttaaattgaagcatcatacaaagttcgttgctttttcaacgtgtgaaaatttttctactgacaatcgtgttatcgttgtcggtactattcaagaa

SEQ ID NO: 97 - protein, 246 aa, Streptococcus agalactiae
MISQRMMMTIVQVINKAIDTLILIFCLVVLFLAGFGLWDSYHLYQQADASNFKKFKTAQQQPKFEDLLALNEDVIGWLNIPGTHIDYPLVQGKTNLEYINKAVDGSVAMSGSLFLDTRNHNDFTDDYSLIYGHHMAGNAMFGEIPKFLKKDFFNKHNKAIIETKERKKLTVTIFACLKTDAFDQLVFNPNAITNQDQQKQLVDYISKRSKQFKPVKLKHHTKFVAFSTCENFSTDNRVIVVGTIQE

SEQ ID NO: 98 - DNA, 672 bp, Streptococcus agalactiae
ttgctttttcaacgtgtgaaaatttttctactgacaatcgtgttatcgttgtcggtactattcaagaataacgaaaggaggagacttttgagaaaatattggaaaatgttattttctgtcgtaatgatattaaccatgctggcctttaatcagactgttttagcaaaagacagcactgttcaaactagcattagtgtcgaaaatgtcttagagagagcaggcgatagtaccccattttcggttgcattagaatcaattgatgcgatgaaaacaatagacgaaataacaattgctggttctggaaaagcaagcttttcccctctgaccttcacaacagttgggcaatatacttatcgtgtttatcagaagccttcacaaaataaagattatcaagcagatactactgtatttgacgttcttgtctatgtgacctatgatgaagatgggactctagtcgcaaaagttatttctcgaagggctggagacgaagaaaaatcagcgattacttttaagcccaaacggttagtaaaaccaataccgcctagacaacctaacatccctaaaaccccattaccattagctggtgaagtaaaaagtttattgggtatcttaagtatcgtattactggggttactagttcttctttatgttaaaaaactgaagagtaggcta

SEQ ID NO: 99 - protein, 224 aa, Streptococcus agalactiae
MLFQRVKIFLLTIVLSLSVLFKNNERRRLLRKYWKMLFSVVMILTMLAFNQTVLAKDSTVQTSISVENVLERAGDSTPFSVALESIDAMKTIDEITIAGSGKASFSPLTFTTVGQYTYRVYQKPSQNKDYQADTTVFDVLVYVTYDEDGTLVAKVISRRAGDEEKSAITFKPKRLVKPIPPRQPNIPKTPLPLAGEVKSLLGILSIVLLGLLVLLYVKKLKSRL

SEQ ID NO: 100 - DNA, 1236 bp, Streptococcus agalactiae
atgatacaactaaggatgggggcaatctatcaaatggttatattcgatttaaaacatgtgcaaacattacacagcttgtctcaattacctatttcagtgatgtcacaagataaggcacttattcaagtatatggtaatgacgactatttattatgttactatcaatttttaaagcatctagctattcctcaagctgcacaagatgttattttttatgagggtttatttgaagagtcctttatgatttttcctctttgtcactacattattgccattggacctttctatccttattcacttaataaagactatcaggaacaattagctaataattttttaaaacattcttctcatcgtagcaaagaagagctcttgtcctatatggcacttgtcccacattttccaattaataatgtgcggaaccttttgatagctattgacgctttttttgacacacaatttgagacgacttgccaacaaacgattcatcaattgttgcagcattcaaaacagatgactgctgatcctgatatcattcatcgccttaagcatattagcaaagcatctagccaattaccgcctgttttagagcacctaaatcatattatggatctggtaaagctaggcaatccacaattgctcaagcaagaaatcaatcgcatccccttatcaagtatcacctcatcttctatttctgctctaagggcggaaaagaacctcactgttatctatttaactaggttactggaattcagttttgtagaaaatactgacgtagcaaagcattatagccttgtcaaatactacatggccttaaatgaagaagcgagtgacttgctcaaagttttgagaattcgctgtgcagctatcatccatttttccgaatcattaaccaataaaagtatttctgataaacgtcaaatgtacaatagtgtgcttcattatgtcgatagtcacctgtattccaaattaaaggtatctgatatcgctaagcgcctatatgtttccgaatctcacttacgttcagtctttaaaaaatactcaaatgtttccttacaacattatattctaagtacaaaaatcaaagaagctcaactactcttaaaacgaggaattcctgttggagaagtggctaaaagcttatatttttatgacactacccattttcataaaatctttaaaaaatacacgggtatttcttcaaaagactatcttgctaaataccgagataatatt

SEQ ID NO: 101 - protein, 412 aa, Streptococcus agalactiae
MIQLRMGAIYQMVIFDLKHVQTLHSLSQLPISVMSQDKALIQVYGNDDYLLCYYQFLKHLAIPQAAQDVIFYEGLFEESFMIFPLCHYIIAIGPFYPYSLNKDYQEQLANNFLKHSSHRSKEELLSYMALVPHFPINNVRNLLIAIDAFFDTQFETTCQQTIHQLLQHSKQMTADPDIIHRLKHISKASSQLPPVLEHLNHIMDLVKLGNPQLLKQEINRIPLSSITSSSISALRAEKNLTVIYLTRLLEFSFVENTDVAKHYSLVKYYMALNEEASDLLKVLRIRCAAIIHFSESLTNKSISDKRQMYNSVLHYVDSHLYSKLKVSDIAKRLYVSESHLRSVFKKYSNVSLQHYILSTKIKEAQLLLKRGIPVGEVAKSLYFYDTTHFHKIFKKYTGISSKDYLAKYRDNI

SEQ ID NO: 102 - DNA, 2088 bp, Streptococcus agalactiae
atgacacaaaaaaatagctataagttaagcttcctgttatccctaacaggatttattttaggtttattattggtttttataggattgtccggagtatcagtaggacatgcggaaacaagaaatggagcaaacaaacaaggagcttttgaaatcaagaaaaataaaagtcaagaagaatataattatgaagtttatgataacagaaacatacttcaggatggggaacataaacttgaaataaaaagagttgatgggacaggtaaaacttatcaaggtttttgctttcagttaacgaaaaattttcccactgctcaaggtgtaagtaaaaagctgtataaaaaattgagtagtagtgatgaagaaacactaaagcaatatgcctctaagtatacaagtaataggagaggagatactagtggtaatcttaaaaagcaaattgctaaggttctgacagaaggttacccaactaacaaaagtgattggttaaatggattgactgaaaacgaaaaaatagaagtaacccaggatgcaatttggtattttacagaaacgacagttccggctgatagaagttatacgaatcgcaacgtaaatagtcaaaaaatgaaagaagtgtatcaaaagctaattgatacaacagatatagataaatatgaagatgtacaatttgatttatttgtgccacaagatacaaacttacaggcagtaattagtgtagagcctgttatcgaaagccttccttggacatcgttgaagccaatagcccagaaggatatcactgccaaaaaaatctgggtagatgcacctaaagaaaaaccaattatttattttaagctatatagacagctgcctggagaaaaggaagtagcagtggatgacgctgagctaaaacagataaatagtgaaggtcaacaagaaatatcagtaacttggacaaatcaacttgttacagatgaaaaaggaatggcttacatttattctgtaaaagaagtagataaaaatggcgagttacttgagccaaaagattatatcaagaaggaagatggacttacagttactaatacttatgtaaagccaactagtgggcactatgatatagaagtgacatttggaaatggacatattgatattacagaagatactacaccagatattgtttcaggtgaaaaccaaatgaagcaaatagagggagaagatagtaagcctattgatgaagtaacggaaaataatttaattgaatttggtaaaaacacgatgccaggtgaagaagatggcacaaattctaataagtatgaagaagtcgaagactcacgcccagttgataccttgtcaggtttatcaagtgagcaaggtcagtccggtgatatgacaattgaagaagatagtgctacccatattaaattctcaaaacgtgatattgacggcaaagagttagctggtgcaactatggagttgcgtgattcatctggtaaaactattagtacatggatttcagatggacaagtgaaagatttctacctgatgccaggaaaatatacatttgtcgaaaccgcagcaccagacggttatgagatagcaactgctattacctttacagttaatgagcaaggtcaggttactgtaaatggcaaagcaactaaaggtgacgctcatattgtcatggttgatgcttacaagccaactaagggttcaggtcaggttattgatattgaagaaaagcttccagacgagcagggccattctggctcaactactgaaatagaagatagcaagtcttcagacgttatcattggtggtcaggggcagattgtcgagacaacagaggatacccaaactggcatgcacggggattctggttgtaaaacggaagtcgaagatactaaactagtacaatccttccactttgataacaaggaatcagaaagtaactctgagattcctaaaaaagataagccaaagagtaatactagtttaccagcaactggtgagaagcaacataatatgttcttttggatggttacttcttgctcacttattagtagtgtttttgtaatatcactaaaaactaaaaaacgcctatcatcatgt

SEQ ID NO: 103 - protein, 696 aa, Streptococcus agalactiae; identical to SEQ ID NO: 79

SEQ ID NO: 104 - DNA, 1320 bp, Streptococcus agalactiae
atgaccatccaaaaaaggatgatatcttgccaatttacacatccttctaaagaaacttatctttaccaactctatgcatcatctaatgtcttacaattactagcgtttttaataaaaaatggttcccactctcgtccccttacggattttgcaagaagtcattttttatcaaactcctcagcttatcggatgcgcgaagcattgattcctttattaagaaactttgaattaaaactctctaagaacaagattgtcggtgaggaatatcgtatccgttacctcatcgctctgctatatagtaagtttggcattaaagtttatgacttgacgcagcaagacaaaaacattattcatagctttttatcccatagttccacccaccttaaaacttctccttggttatcggaatcgttttctttctatgacattttattagctttatcgtggaagcggcatcaattttcggtaactattccccaaaccagaatttttcaacaattaaaaaaactttttgtctacgattctttgaaaaaaagtagccgtgatattatcgaaacttactgccaactaaacttttcagcaggagatttggactacctctatttaatttatatcaccgctaataattcttttgcgagcttacaatggacacctgagcatatcagacaatgttgtcaactttttgaagaaaatgatacttttcgcctgcttttaaatcctatcatcactcttttacctaacctaaaagagcaaaaggctagtttagtaaaagctcttatgtttttttcaaaatcattcttgtttaatctgcaacattttattcctgagaccaacttattcgtttctccgtactataaaggaaaccaaaaactctatacgtccttaaagttaattgtcgaagagtggatggccaaacttcctggtaagcgttacttgaaccataagcattttcatcttttttgccactatgtcgagcaaattctaagaaatatccaacctcctttagttgttgttttcgtagccagtaattttatcaatgctcatctcctaacagattctttcccaaggtatttctcggataaaagcattgattttcattcctattatctattgcaagataatgtttatcaaattcctgatttaaagccagatttggtcatcactcacagtcaactgattccttttgttcaccatgaacttacaaaaggaattgctgttgctgaaatatcttttgatgaatcgattctgtctatccaagaattgatgtatcaagttaaagaggaaaaattccaagctgatttaaccaaacaattaacataa

SEQ ID NO: 105 - protein, 439 aa, Streptococcus agalactiae
MTIQKRMISCQFTHPSKETYLYQLYASSNVLQLLAFLIKNGSHSRPLTDFARSHFLSNSSAYRMREALIPLLRNFELKLSKNKIVGEEYRIRYLIALLYSKFGIKVYDLTQQDKNIIHSFLSHSSTHLKTSPWLSESFSFYDILLALSWKRHQFSVTIPQTRIFQQLKKLFVYDSLKKSSRDIIETYCQLNFSAGDLDYLYLIYITANNSFASLQWTPEHIRQCCQLFEENDTFRLLLNPIITLLPNLKEQKASLVKALMFFSKSFLFNLQHFIPETNLFVSPYYKGNQKLYTSLKLIVEEWMAKLPGKRYLNHKHFHLFCHYVEQILRNIQPPLVVVFVASNFINAHLLTDSFPRYFSDKSIDFHSYYLLQDNVYQIPDLKPDLVITHSQLIPFVHHELTKGIAVAEISFDESILSIQELMYQVKEEKFQADLTKQLT

SEQ ID NO: 106 - DNA, 2097 bp, Streptococcus agalactiae
atggtaagctcatatatgtttgcgagaggagagaaaatgaataacaaaatgtttttgaacaaagaagccggttttttggtacacacaaaaagaaaaaggcgatttgctgtcactttagtgggagtcttttttctgcttttggcatgtgcgggtgctatcggttttggtcaagtagcctatgctgcggatgagaagactgtgccgaattttaaaagcccagatccagattatccctggtatggttatgattcgtatagaggaatatttgcaagatatcacaatttaaaagtaaatctaaaaggaagtaaggagtatcaagcgtattgttttaacctaacaaaatactttcctcgccccacttatagtactacaaataatttttacaagaaaattgatgggagtggatcagcgttcaaatcttatgcagcgaatcctagggttttagatgagaatttagataaattagaaaaaaatatactgaatgtaatttataatggatataaaagtaatgcaaatggttttatgaatggtatagaagatcttaatgctatactagtaactcaaaacgctatttggtactattcagatagtgctccattaaatgatgttaataaaatgtgggaaagagaggttcggaatggggagattagtgagtcacaagttactttaatgcgtgaggcattgaaaaaactaattgatcccaatttagaagctactgcagctaataaaatcccatcaggatatcgtttaaatatctttaagtctgaaaatgaagattaccaaaatcttttaagtgctgaatatgtacctgatgatccccctaaacctggtgatacgtcagaacataatcctaaaactcccgagttggatggcactccaattcccgaggacccaaaacgtccagatgagagttcagaacctgcgcttcccccattaatgccagagctagatggtgaagaagtcccagaagttccaagcgagagcttagaacctgcgcttcccccattgatgccagagctagatggtgaagaagtcccagaagttccaagcgagagcttagaacctgcgcttcccccattgatgccagagctagatggtgaagaagtcccagaagttccaagcgagagcttagaacctgcgcttcccccattaatgccagagctagatggtgaagaagtcccagaagttccaagcgagagcttagaacctgcgcttcccccattgatgccagagttagatggtgaagaagtccctgaaaaacctagtgttgacttacctattgaagttcctcgttatgagtttaacaataaagaccagtcacctctagcgggtgagtctggtgagacggagtatattaccgaagtctatggaaatcaacagaaccctgttgatattgataaaaaacttccgaatgaaacaggtttttcaggaaatatggttgagacagaagatacgaaagagccagaagtgttgatgggaggtcaaagtgagtctgttgaatttactaaagacactcaaacaggcatgagtggtcaaacaactcctcaggttgagacagaagatacgaaagagccagaagtgttgatgggaggtcaaagtgagtctgttgaatttactaaagacactcaaacaggcatgagtggtcaaacaactcctcaggttgagacagaagatacgaaagagccaggagtgttgatgggaggccaaagtgagtctgttgaatttactaaagacactcaaacaggcatgagtggtcaaacaactcctcaggttgagacagaagacacgaaagagccaggagtgttgatgggaggtcaaagtgagtctgttgaatttactaaagacactcaaacaggcatgagcggtttcagtgaaacagtgaccattgttgaagatacgcgtccgaagttagtgttccattttgacaataatgagcccaaagtggaagagaatcgggaaaagcctacaaaaaatataacacctatccttcctgcaacaggagatattgagaatgttttggcctttcttggaatccttattttgtcagtactttctatttttagccttttaaaaaacaaacaaaacaataaagtctga

SEQ ID NO: 107 - protein, 698 aa, Streptococcus agalactiae
MVSSYMFARGEKMNNKMFLNKEAGFLVHTKRKRRFAVTLVGVFFLLLACAGAIGFGQVAYAADEKTVPNFKSPDPDYPWYGYDSYRGIFARYHNLKVNLKGSKEYQAYCFNLTKYFPRPTYSTTNNFYKKIDGSGSAFKSYAANPRVLDENLDKLEKNILNVIYNGYKSNANGFMNGIEDLNAILVTQNAIWYYSDSAPLNDVNKMWEREVRNGEISESQVTLMREALKKLIDPNLEATAANKIPSGYRLNIFKSENEDYQNLLSAEYVPDDPPKPGDTSEHNPKTPELDGTPIPEDPKRPDESSEPALPPLMPELDGEEVPEVPSESLEPALPPLMPELDGEEVPEVPSESLEPALPPLMPELDGEEVPEVPSESLEPALPPLMPELDGEEVPEVPSESLEPALPPLMPELDGEEVPEKPSVDLPIEVPRYEFNNKDQSPLAGESGETEYITEVYGNQQNPVDIDKKLPNETGFSGNMVETEDTKEPEVLMGGQSESVEFTKDTQTGMSGQTTPQVETEDTKEPEVLMGGQSESVEFTKDTQTGMSGQTTPQVETEDTKEPGVLMGGQSESVEFTKDTQTGMSGQTTPQVETEDTKEPGVLMGGQSESVEFTKDTQTGMSGFSETVTIVEDTRPKLVFHFDNNEPKVEENREKPTKNITPILPATGDIENVLAFLGILILSVLSIFSLLKNKQNNKV

SEQ ID NO: 108 - DNA, 2271 bp, Streptococcus agalactiae
atgaataacaaaaaattgcaaaagaagcaagatgctcctcgggtatcaaacagaaagccaaaacaattaactgtcactttagtgggagtatttttaatgtttttgaccttggtaagttccatgagaggtgctcaaagcatatttggagaggaaaagagaattgaagaagtcagtgttcctaaaataaaaagtccagatgatgcctacccttggtatggctatgattcatatgactctagtcatccttactatgaacgttttaaagtagcacatgatttaagggttaatttaaatggaagtaagagctaccaagtatattgctttaatatcaattctcattatccgaatagaaaaaatgctttttctaaacaatggtttaagagagttgatgggacaggtgatgtgttcacaaattatgctcagacacctaagattcgtggagaatcattgaataataaacttttaagtattatgtacaacgcttatcctaaaaatgctaatggctatatggataagatagaaccattaaatgctattttagtaactcaacaagctgtttggtactattctgacagttcttatggtaatataaaaacgttatgggcatctgagcttaaagacggaaaaatagattttgaacaagtaaaattaatgcgtgaagcttactcaaaactaattagtgatgatttagaagaaacatctaaaaataagctacctcaaggatctaaactgaatatttttgttccgcaagataaatctgttcaaaatttattaagtgcagagtacgtgcctgaatcccctccggcaccaggtcagtctccagaaccgccagtgcaaacaaaaaaaacatcagtcattatcagaaaatatgcggaaggtgactactctaaacttctagagggagcaactttgcgtttaacaggggaagatatcctagattttcaagaaaaagtcttccaaagtaatggaacaggagaaaagattgaattatcaaatgggacttataccttaacagaaacatcatctccagatggatataaaattgcggagccgattaagtttagagtagtgaataaaaaagtatttatcgtccaaaaagatggttctcaagtggaaaatccaaacaaagaagtagcagagccatactcagtggaagcgtacagcgatatgcaagatagtaactatattaatccagaaacgttcactccttatgggaaattttattacgctaaaaataaggataaaagttcacaagttgtctactgttttaatgctgatttacactctccacctgaatcagaggatgggggaggaactatagatcctgatattagtacgatgaaagaagtcaagtacacacatacggcaggtagtgatttgtttaaatacgcgctaagaccgagagatacaaatccagaagacttcttaaagcacattaaaaaagtaattgaaaaaggctacaataaaaaaggtgatagctataatggattaacagaaacacagtttcgcgcggctactcagcttgctatctattactttacagacagcactgacttaaaaaccttaaaaacttataacaatgggaaaggttaccatggatttgaatctatggatgaaaaaaccctagctgtaacaaaagaattaattaattacgctcaagataatagtgcccctcaactaacaaatcttgatttcttcgtacctaataatagcaaataccaatctcttattgggacagaataccatccagatgatttggttgacgtgattcgtatggaagataaaaagcaagaagttattccagtaactcacagtttgacagtgaaaaaaacagtagtcggtgagttgggagataaaactaaaggcttccaatttgaacttgagttgaaagataaaactggacagcctattgttaacactctaaaaactaataatcaagatttagtagctaaagatgggaaatattcatttaatctaaagcatggtgacaccataagaatagaaggattaccgacgggatattcttatactctgaaagagactgaagctaaggattatatagtaaccgttgataacaaagttagtcaagaagctcaatcagcaagtgagaatgtcacagcagacaaagaagtcacttttgaaaaccgtaaagatcttgtcccaccaactggttttattactgatggtggaacctatctgtggttattattgcttgtcccatttggtttgttagtgtggttctttggtcgtaaaggactaaaaaatgactaa

SEQ ID NO: 109 - protein, 756 aa, Streptococcus agalactiae
MNNKKLQKKQDAPRVSNRKPKQLTVTLVGVFLMFLTLVSSMRGAQSIFGEEKRIEEVSVPKIKSPDDAYPWYGYDSYDSSHPYYERFKVAHDLRVNLNGSKSYQVYCFNINSHYPNRKNAFSKQWFKRVDGTGDVFTNYAQTPKIRGESLNNKLLSIMYNAYPKNANGYMDKIEPLNAILVTQQAVWYYSDSSYGNIKTLWASELKDGKIDFEQVKLMREAYSKLISDDLEETSKNKLPQGSKLNIFVPQDKSVQNLLSAEYVPESPPAPGQSPEPPVQTKKTSVIIRKYAEGDYSKLLEGATLRLTGEDILDFQEKVFQSNGTGEKIELSNGTYTLTETSSPDGYKIAEPIKFRVVNKKVFIVQKDGSQVENPNKEVAEPYSVEAYSDMQDSNYINPETFTPYGKFYYAKNKDKSSQVVYCFNADLHSPPESEDGGGTIDPDISTMKEVKYTHTAGSDLFKYALRPRDTNPEDFLKHIKKVIEKGYNKKGDSYNGLTETQFRAATQLAIYYFTDSTDLKTLKTYNNGKGYHGFESMDEKTLAVTKELINYAQDNSAPQLTNLDFFVPNNSKYQSLIGTEYHPDDLVDVIRMEDKKQEVIPVTHSLTVKKTVVGELGDKTKGFQFELELKDKTGQPIVNTLKTNNQDLVAKDGKYSFNLKHGDTIRIEGLPTGYSYTLKETEAKDYIVTVDNKVSQEAQSASENVTADKEVTFENRKDLVPPTGFITDGGTYLWLLLLVPFGLLVWFFGRKGLKND

SEQ ID NO: 110 - DNA, 522 bp, Streptococcus agalactiae
atgactaattacctaaatcgcttaaatgagaatccactatttaaagctttcatacggttagtacttaagatttctattattggatttctaggttacattctatttcagtatgtttttggcgtcatgattgttaacacaaatcagatgagtcctgctgtaagtgctggtgatggagtcttatattatcgtttgactgatcgctatcatattaatgatgtggtggtctatgaggttgataacactttgaaagttggtcgaattgccgctcaagctggcgatgaggttagttttacgcaagaaggaggactgttgattaatgggcatccaccagaaaaagaggtcccttacctgacgtatcctcactcaagtggtccaaactttccctataaagttcctacgggtacgtatttcatattgaatgattatcgtgaagaacgtttggacagtcgttattatggggcgttacccatcaatcaaatcaaagggaaaatctcaactctattaagagtgagaggaatttaa

SEQ ID NO: 111 - protein, 173 aa, Streptococcus agalactiae
MTNYLNRLNENPLFKAFIRLVLKISIIGFLGYILFQYVFGVMIVNTNQMSPAVSAGDGVLYYRLTDRYHINDVVVYEVDNTLKVGRIAAQAGDEVSFTQEGGLLINGHPPEKEVPYLTYPHSSGPNFPYKVPTGTYFILNDYREERLDSRYYGALPINQIKGKISTLLRVRGI

SEQ ID NO: 112 - DNA, 1029 bp, Streptococcus agalactiae
atgaaaaaaaataaattattacttgctactgcaatcttagcaactgctttaggaacagcttctttaaatcaaaacgtaaaagctgagacggcaggggttgttagcagtggtcaattaacaataaaaaaatcaattacaaattttaatgatgatacacttttgatgcctaagacagactatacttttagcgttaatccggatagtgcggctacaggtactgaaagtaatttaccaattaaaccaggtattgctgttaacaatcaagatattaaggtttcttattctaatactgataagacatcaggtaaagaaaaacaagttgttgttgactttatgaaagttacttttcctagcgttggtatttaccgttatgttgttaccgagaataaagggacagcagaaggagttacatatgatgatacaaaatggttagttgacgtctatgttggtaataatgaaaagggaggtcttgaaccaaagtatattgtatctaaaaaaggagattctgctactaaagaaccaatccagtttaataattcattcgaaacaacgtcattaaaaattgaaaaggaagttactggtaatacaggagatcataaaaaagcatttacctttacattaacattgcaaccaaatgaatactatgaggcaagttcggttgtgaaaattgaagagaacggacaaacgaaagatgtgaaaattggggaggcatataagtttactttgaacgatagtcagagtgtgatattgtctaaattaccagttggtattaattataaagttgaagaagcagaagctaatcaaggtggatatactacaacagcaactttaaaagatggagaaaagttatctacttataacttaggtcaggaacataaaacagacaagactgctgatgaaatcgttgtcacaaataaccgtgacactcaagttccaactggtgttgtaggcacccttgctccatttgcagttcttagcattgtggctattggtggagttatctatattacaaaacgtaaaaaagcttaa

SEQ ID NO: 113 - protein, 342 aa, Streptococcus agalactiae
MKKNKLLLATAILATALGTASLNQNVKAETAGVVSSGQLTIKKSITNFNDDTLLMPKTDYTFSVNPDSAATGTESNLPIKPGIAVNNQDIKVSYSNTDKTSGKEKQVVVDFMKVTFPSVGIYRYVVTENKGTAEGVTYDDTKWLVDVYVGNNEKGGLEPKYIVSKKGDSATKEPIQFNNSFETTSLKIEKEVTGNTGDHKKAFTFTLTLQPNEYYEASSVVKIEENGQTKDVKIGEAYKFTLNDSQSVILSKLPVGINYKVEEAEANQGGYTTTATLKDGEKLSTYNLGQEHKTDKTADEIVVTNNRDTQVPTGVVGTLAPFAVLSIVAIGGVIYITKRKKA

SEQ ID NO: 114 - DNA, 726 bp, Streptococcus agalactiae
atgatgatgacaattgtacaggttatcaataaagccattgatactctcattcttatcttttgtttagtcgtactatttttagctggttttggtttgtgggattcttatcatctctatcaacaagcagacgcttctaatttcaaaaaatttaaaacagctcaacaacagcctaaatttgaagacttgttagctttgaatgaggatgtcattggttggttaaatatcccggggactcatattgattatcctctagttcagggaaaaacgaatttagagtatattaataaagcagttgatggcagtgttgccatgtctggtagtttatttttagatacacggaatcataatgattttacggacgattactctctgatttatggccatcatatggcaggtaatgccatgtttggcgaaattccaaaatttttaaaaaaggattttttcaacaaacataataaagctatcattgaaacaaaagagagaaaaaaactaaccgtcactatttttgcttgtctcaagacagatgcctttgaccagttagtttttaatcctaatgctattaccaatcaagaccaacaaaggcagctcgttgattatatcagtaaaagatcaaaacaatttaaacctgttaaattgaagcatcatacaaagttcgttgctttttcaacgtgtgaaaatttttctactgacaatcgtgttatcgttgtcggtactattcaagaataa

SEQ ID NO: 115 - protein, 241 aa, Streptococcus agalactiae
MMMTIVQVINKAIDTLILIFCLVVLFLAGFGLWDSYHLYQQADASNFKKFKTAQQQPKFEDLLALNEDVIGWLNIPGTHIDYPLVQGKTNLEYINKAVDGSVAMSGSLFLDTRNHNDFTDDYSLIYGHHMAGNAMFGEIPKFLKKDFFNKHNKAIIETKERKKLTVTIFACLKTDAFDQLVFNPNAITNQDQQRQLVDYISKRSKQFKPVKLKHHTKFVAFSTCENFSTDNRVIVVGTIQE

SEQ ID NO: 116 - DNA, 560 bp, Streptococcus agalactiae
atgttattttctgtcgtaatgatattaaccatgctggcctttaatcagactgttttagcaaaagacagcactgttcaaactagcattagtgtcgaaaatgtcttagagagagcaggcgatagtaccccattttcgattgcattagaatcaattgatgcgatgaaaacaatagaagaaataacaattgctggttctggaaaagcaagcttttcccctctgaccttcacaacagttgggcaatatacttatcgtgtttatcagaagccttcacaaaataaagattatcaagcagatactactgtatttgacgttcttgtctatgtgacctatgatgaagatgggactctagtcgcaaaagttatttctcgaagggctggagacgaagaaaaatcagcgattacttttaagcccaaacggttagtaaaaccaataccgcctagacaacctaacatccctaaaaccccattaccattagctggtgaagtaaaaagtttattgggtatcttaagtatcgtattactggggttactagttcttctttatgttaaaaaactgaagag

SEQ ID NO: 117 - protein, 189 aa, Streptococcus agalactiae
MLFSVVMILTMLAFNQTVLAKDSTVQTSISVENVLERAGDSTPFSIALESIDAMKTIEEITIAGSGKASFSPLTFTTVGQYTYRVYQKPSQNKDYQADTTVFDVLVYVTYDEDGTLVAKVISRRAGDEEKSAITFKPKRLVKPIPPRQPNIPKTPLPLAGEVKSLLGILSIVLLGLLVLLYVKKLKSKL

SEQ ID NO: 118 - DNA, 1206 bp, Streptococcus agalactiae
atggttatattcgatttaaaacatgtgcaaacattacacagcttgtctcaattacctatttcagtgatgtcacaagataaggcacttattcaagtatatggtaatgacgactatttattatgttactatcaatttttaaagcatctagctattcctcaagctgcacaagatgttattttttatgagggtttatttgaagagtcctttatgatttttcctctttgtcactacattattgccattggacctttctacccttattcacttaataaagactatcaggaacaattagctaataattttttaaaacattcttctcatcgtagcaaagaagagctcttatcctatatggcacttgtcccacattttccaattaataatgtgcggaaccttttgatagctattgacgctttttttgacacacaatttgagacgacttgccaacaaacaattcatcaattgttgcagcattcaaaacagatgactgctgatcctgatatcattcatcgccttaagcatattagcaaagcatctagccaactaccgcctgttttagagcacctaaatcatattatggatctggtaaagctaggcaatccacaattgctcaagcaagaaatcaatcgcatccccttatcaagtatcacctcatcttctatttctgctctaagggcggaaaagaacctcactgttatctatttaactaggttactggaattcagttttgtagaaaatactgacgtagcaaagcattatagccttgtcaaatactacatggccttaaatgaagaagcgagtgacttgctcaaagttttgagaattcgctgtgcagccatcatccatttttccgaatcattaaccaataaaagtatttctgataaacgtcaaatgtacaatagtgtgcttcattatgtcgatagtcacctgtattccaaattaaaggtatctgatatcgctaagcgcctatatgtttccgaatctcacttacgttcagtctttaaaaaatactcaaatgtttccttacaacattatattctaagtacaaaaatcaaagaagctcaactactcttaaaacgaggaattcctgttggagaagtggctaaaagcttatatttttatgacactacccattttcataaaatctttaaaaaatacacgggtatttcttcaaaagactatcttgctaaataccgagataatatttaa

SEQ ID NO: 119 - protein, 401 aa, Streptococcus agalactiae
MVIFDLKHVQTLHSLSQLPISVMSQDKALIQVYGNDDYLLCYYQFLKHLAIPQAAQDVIFYEGLFEESFMIFPLCHYIIAIGPFYPYSLNKDYQEQLANNFLKHSSHRSKEELLSYMALVPHFPINNVRNLLIAIDAFFDTQFETTCQQTIHQLLQHSKQMTADPDIIHRLKHISKASSQLPPVLEHLNHIMDLVKLGNPQLLKQEINRIPLSSITSSSISALRAEKNLTVIYLTRLLEFSFVENTDVAKHYSLVKYYMALNEEASDLLKVLRIRCAAIIHFSESLTNKSISDKRQMYNSVLHYVDSHLYSKLKVSDIAKRLYVSESHLRSVFKKYSNVSLQHYILSTKIKEAQLLLKRGIPVGEVAKSLYFYDTTHFHKIFKKYTGISSKDYLAKYRDNI

SEQ ID NO: 120 - DNA, 3486 bp, Streptococcus agalactiae
atgacacaaaaaaatagctataagttaagcttcctgttatccctaacaggatttattttaggtttattattggtttttataggattgtccggagtatcagtaggacatgcggaaacaagaaatggagcaaacaaacaaggatcttttgaaatcaagaaagtcgaccaaaacaataagcctttaccgggagcaactttttcactgacatcaaaggatggcaagggaacatctgttcaaacgttcacttcaaatgataaaggtattgtagatgctcaaaatctccaaccagggacttataccttaaaagaagaaacagcaccagatggttatgataaaaccagccggacttggacagtgactgtttatgagaacggctataccaagttggttgaaaatccctataatggggaaatcatcagtaaagcagggtcaaaagatgttagtagttctttacagttggaaaatcccaaaatgtcagttgtttctaaatatgggaaaacagaggttagtagtggcgcagcggatttctaccgcaaccatgccgcctattttaaaatgtcttttgagttgaaacaaaaggataaatctgaaacaatcaacccaggtgatacctttgtgttacagctggatagacgtctcaatcctaaaggtatcagtcaagatatccctaaaatcatttacgacagtgcaaatagtccgcttgcgattggaaaataccatgctgagaaccatcaacttatctatactttcacagattatattgcgggtttagataaagtccagttgtctgcagaattgagcttattcctagagaataaggaagtgttggaaaatactagtatctcaaattttaagagtaccataggtgggcaggagatcacctataaaggaacggttaatgttctttatggaaatgagagcactaaagaaagcaattatattactaatggattgagcaatgtgggtgggagtattgaaagctacaacaccgaaacgggagaatttgtctggtatgtttatgtcaatccaaaccgtaccaatattccttatgcgaccatgaatttatggggatttggaagggctcgttcaaatacaagcgacttagaaaacgacgctaatacaagtagtgctgagcttggagagattcaggtctatgaagtacctgaaggagaaaaattaccatcaagttatggggttgatgttacaaaacttactttaagaacggatatcacagcaggcctaggaaatggttttcaaatgaccaaacgtcagcgaattgactttggaaataatatccaaaataaagcatttatcatcaaagtaacagggaaaacagaccaatctggtaagccattggttgttcaatccaatttggcaagttttcgtggtgcttctgaatatgctgcttttactccagttggaggaaatgtctacttccaaaacgaaattgccttgtctccttctaagggtagtggttctgggaaaagtgaatttactaagccctctattacagtagcaaatctaaaacgagtggctcagcttcgctttaagaaaatgtcaactgacaatgtgccattgccagaagcggcttttgagctgcgttcatcaaatggtaatagtcagaaattagaagccagttcaaacacacaaggagaggttcactttaaggacctgacctcgggcacatatgacctgtatgaaacaaaagcgccaaaaggttatcagcaggtgacagagaaattggcgaccgttactgttgatactaccaaacctgctgaggaaatggtcacttggggaagcccacattcgtctgtaaaagtagaagctaacaaagaagtcacgattgtcaaccataaagaaacccttacgttttcagggaagaaaatttgggagaatgacagaccagatcaacgcccagcaaagattcaagtgcaactgttgcaaaatggtcaaaagatgcctaaccagattcaagaagtaacgaaggataacgattggtcttatcacttcaaagacttgcctaagtacgatgccaagaatcaggagtataagtactcagttgaagaagtaaatgttccagacggctacaaggtgtcgtatttaggaaatgatatatttaacaccagagaaacagaatttgtgtttgaacagaataactttaaccttgaatttggaaatgctgaaataaaaggtcaatctgggtcaaaaatcattgatgaagacacgctaacgtctttcaaaggtaagaaaatttggaaaaatgatacggcagaaaatcgtccccaagccattcaagtgcagctttatgctgatggagtggctgtggaaggtcaaaccaaatttatttctggctcaggtaatgagtggtcatttgagtttaaaaacttgaagaagtataatggaacaggtaatgacatcatttactcagttaaagaagtaactgttccaacaggttatgatgtgacttactcagctaatgatattattaataccaaacgtgaggttattacacaacaaggaccgaaactagagattgaagaaacgcttccgctagaatcaggtgcttcaggcggtaccactactgtcgaagactcacgcccagttgataccttatcaggtttatcaagtgagcaaggtcagtccggtgatatgacaattgaagaagatagtgctacccatattaaattctcaaaacgtgatattgacggcaaagagttagctggtgcaactatggagttgcgtgattcatctggtaaaactattagtacatggatttcagatggacaagtgaaagatttctacctgatgccaggaaaatatacatttgtcgaaaccgcagcaccagacggttatgagatagcaactgctattacctttacagttaatgagcaaggtcaggttactgtaaatggcaaagcaactaaaggtgacactcatattgtcatggttgatgcttacaagccaactaagggttcaggtcaggttattgatattgaagaaaagcttccagacgagcaaggtcattctggttcaactactgaaatagaagacagtaaatcttcagaccttatcattggcggtcaaggtgaagttgttgacacaacagaagacacacaaagtggtatgacgggccattctggctcaactactgaaatagaagatagcaagtcttcagacgttatcattggtggtcaggggcaggttgtcgagacaacagaggatacccaaactggcatgtacggggattctggttgtaaaacggaagtcgaagatactaaactagtacaatccttccactttgataacaaggaaccagaaagtaactctgagattcctaaaaaagataagccaaagagtaatactagtttaccagcaactggtgagaagcaacataatatgttcttttggatggttacttcttgctcacttattagtagtgtttttgtaatatcactaaaatccaaaaaacgcctatcatcatgttaa

SEQ ID NO: 121 - protein, 1161 aa, Streptococcus agalactiae
MTQKNSYKLSFLLSLTGFILGLLLVFIGLSGVSVGHAETRNGANKQGSFEIKKVDQNNKPLPGATFSLTSKDGKGTSVQTFTSNDKGIVDAQNLQPGTYTLKEETAPDGYDKTSRTWTVTVYENGYTKLVENPYNGEIISKAGSKDVSSSLQLENPKMSVVSKYGKTEVSSGAADFYRNHAAYFKMSFELKQKDKSETINPGDTFVLQLDRRLNPKGISQDIPKIIYDSANSPLAIGKYHAENHQLIYTFTDYIAGLDKVQLSAELSLFLENKEVLENTSISNFKSTIGGQEITYKGTVNVLYGNESTKESNYITNGLSNVGGSIESYNTETGEFVWYVYVNPNRTNIPYATMNLWGFGRARSNTSDLENDANTSSAELGEIQVYEVPEGEKLPSSYGVDVTKLTLRTDITAGLGNGFQMTKRQRIDFGNNIQNKAFIIKVTGKTDQSGKPLVVQSNLASFRGASEYAAFTPVGGNVYFQNEIALSPSKGSGSGKSEFTKPSITVANLKRVAQLRFKKMSTDNVPLPEAAFELRSSNGNSQKLEASSNTQGEVHFKDLTSGTYDLYETKAPKGYQQVTEKLATVTVDTTKPAEEMVTWGSPHSSVKVEANKEVTIVNHKETLTFSGKKIWENDRPDQRPAKIQVQLLQNGQKMPNQIQEVTKDNDWSYHFKDLPKYDAKNQEYKYSVEEVNVPDGYKVSYLGNDIFNTRETEFVFEQNNFNLEFGNAEIKGQSGSKIIDEDTLTSFKGKKIWKNDTAENRPQAIQVQLYADGVAVEGQTKFISGSGNEWSFEFKNLKKYNGTGNDIIYSVKEVTVPTGYDVTYSANDIINTKREVITQQGPKLEIEETLPLESGASGGTTTVEDSRPVDTLSGLSSEQGQSGDMTIEEDSATHIKFSKRDIDGKELAGATMELRDSSGKTISTWISDGQVKDFYLMPGKYTFVETAAPDGYEIATAITFTVNEQGQVTVNGKATKGDTHIVMVDAYKPTKGSGQVIDIEEKLPDEQGHSGSTTEIEDSKSSDLIIGGQGEVVDTTEDTQSGMTGHSGSTTEIEDSKSSDVIIGGQGQVVETTEDTQTGMYGDSGCKTEVEDTKLVQSFHFDNKEPESNSEIPKKDKPKSNTSLPATGEKQHNMFFWMVTSCSLISSVFVISLKSKKRLSSC

SEQ ID NO: 122 - protein, 5 aa, Artificial
  Sortase substrate motif
  misc_feature (3)..(3): X = any amino acid residue
LPXTG

SEQ ID NO: 123 - protein, 5 aa, Artificial
  sortase substrate motif
FPKTG

SEQ ID NO: 124 - protein, 5 aa, Artificial
  sortase substrate motif
IPKTG

SEQ ID NO: 125 - DNA, 2118 bp, Streptococcus agalactiae
ttaagcttcctttgattggcgtcttttcatgataactactgctccaagcataatgcttaaaccaataattgtgaaaagaattgtaccaataccacctgtttgtgggattgttacctttttattttctacacgtgtcgcatctttttggttgctgttagcaacgtagtcaatgttaccacctgttatgtatgacccttgattaactacaaacttaatattacctgccaacttagcaaatcctgctggagcaagtgtttcttcaaggttgtaagtaccgtctgcaagacctgtaacttcaaattgaccttgatcgtttgaagtgtaggtaatggctctagccttatctgttatccactcataagctgtacgagcctcaatgaaggctgcatcgtaatctgcttgtttagttttgataagttcttttgcagtaattcctttttcacctttttggtctgttgcagacaacttgttataagcagcgatagcttcatctaaagctattttcttagcagctaaagttttttgaccttctgattgatctgctttaagagcaaggtatttacctgctgagtttttcacaacgaattgtgcaccagccaaacggtcaccttgttcattagttttgacaaatttcttaccatgagtttcaacttttggttcagttgggttcaatggtgttgggttatcagaatctttggtattggtaatggttactttaccattttctagatttattgcacttccgtaaccagaaacacgttctgagatcatgtatgatttgttttctagaccagtgaatttacccgagaagttaccagatacttcaaatttgataccatttccaaggtcgattgtacctttagatgtttttgtcaatgatactgaagcaacagttttatctttatctttcaatgtgtaaacaacgtttacaccatcaggtgcaattccgtcagaccaagttttagcaactgttacttcaccctttgaaggtgtaacaggaagttcagtcaagtctttacctggtttgttaccatacgacaatttgatatcattggattctggattatcaataattgcttgaccattaacagtagcactataagtcaatgtaaattcaatatcagctgttttagctgctttttccaatttgcccaatccatcagctgtgaattttaatgtgaaaccacgggcatcaatgctaagttcatagtctgtatccttagcaaaagtttctgtagttcctgaagctttaaggctaacagttgaacccattgtcaaaccatttgacattatatctgtccaaaccaagttttcgtatttagaacctttgtgaatttttgttttaacttcataaggaacaactttaccgatttcagcagtagcagttgctttgtcacgtgcataattaccataatttgcgccagctgtcaaaagtctattaacatctgtcaatgctgtcaaatcgtttgttttagcaaagtttttatcaatttctggtttttcttcagtgttctttggataaacatgggcatcagcaacaacaccatcttcatttaccaatggaagagtgatgttaactggaaccgcttttgaagcagccaggagggaaccattattgttgtaagtagattttgatttaacttcaacaattttaaactcgcctttcaatcctttggtgttgaaaacaagtccagtatctccctctggtgtcaatccagacacggcctcatcaatatttactgttatttcaggagtaccatctttattaattaaggctggtgttaatttgttaccttcttttgccttaacatattgcactttaccacttttatcttctttcaaagctaaagcaaagaacgcaccttcgatttctttagatccctcgccaaagtaaccagcaaggtcagaaatagctccacctttgtagtcttttccgttaagacctgtagttcctgggaagttacttttgttaagatttgattcggtttgcaaaatcttgtgcaaagtcactgtattagttgttgcttcatccgcaaacgctggtgcaactgagagcaatgacgttaaagtcagtaacaatgccgagaacattgcaaaatatttgttgattcttttcat

SEQ ID NO: 126 - protein, 705 aa, Streptococcus agalactiae
MKRINKYFAMFSALLLTLTSLLSVAPAFADEATTNTVTLHKILQTESNLNKSNFPGTTGLNGKDYKGGAISDLAGYFGEGSKEIEGAFFALALKEDKSGKVQYVKAKEGNKLTPALINKDGTPEITVNIDEAVSGLTPEGDTGLVFNTKGLKGEFKIVEVKSKSTYNNNGSLLAASKAVPVNITLPLVNEDGVVADAHVYPKNTEEKPEIDKNFAKTNDLTALTDVNRLLTAGANYGNYARDKATATAEIGKVVPYEVKTKIHKGSKYENLVWTDIMSNGLTMGSTVSLKASGTTETFAKDTDYELSIDARGFTLKFTADGLGKLEKAAKTADIEFTLTYSATVNGQAIIDNPESNDIKLSYGNKPGKDLTELPVTPSKGEVTVAKTWSDGIAPDGVNVVYTLKDKDKTVASVSLTKTSKGTIDLGNGIKFEVSGNFSGKFTGLENKSYMISERVSGYGSAINLENGKVTITNTKDSDNPTPLNPTEPKVETHGKKFVKTNEQGDRLAGAQFVVKNSAGKYLALKADQSEGQKTLAAKKIALDEAIAAYNKLSATDQKGEKGITAKELIKTKQADYDAAFIEARTAYEWITDKARAITYTSNDQGQFEVTGLADGTYNLEETLAPAGFAKLAGNIKFVVNQGSYITGGNIDYVANSNQKDATRVENKKVTIPQTGGIGTILFTIIGLSIMLGAVVIMKRRQSKEA

SEQ ID NO: 127 - DNA, 2025 bp, Streptococcus agalactiae
atgaaaaaaatcaacaaatgtcttacaatgttctcgacactgctattgatcttaacgtcactattctcagttgcaccagcgtttgcggacgacgcaacaactgatactgtgaccttgcacaagattgtcatgccacaagctgcatttgataactttactgaaggtacaaaaggtaagaatgatagcgattatgttggtaaacaaattaatgaccttaaatcttattttggctcaaccgatgctaaagaaatcaagggtgctttctttgttttcaaaaatgaaactggtacaaaattcattactgaaaatggtaaggaagtcgatactttggaagctaaagatgctgaaggtggtgctgttctttcagggttaacaaaagacaatggttttgtttttaacactgctaagttaaaaggaatttaccaaatcgttgaattgaaagaaaaatcaaactacgataacaacggttctatcttggctgattcaaaagcagttccagttaaaatcactctgccattggtaaacaaccaaggtgttgttaaagatgctcacatttatccaaagaatactgaaacaaaaccacaagtagataagaactttgcagataaagatcttgattatactgacaaccgaaaagacaaaggtgttgtctcagcgacagttggtgacaaaaaagaatacatagttggaacaaaaattcttaaaggctcagactataagaaactggtttggactgatagcatgactaaaggtttgacgttcaacaacaacgttaaagtaacattggatggtgaagattttcctgttttaaactacaaactcgtaacagatgaccaaggtttccgtcttgccttgaatgcaacaggtcttgcagcagtagcagcagctgcaaaagacaaagatgttgaaatcaagatcacttactcagctacggtgaacggctccactactgttgaaattccagaaaccaatgatgttaaattggactatggtaataacccaacggaagaaagtgaaccacaagaaggtactccagctaaccaagaaattaaagtcattaaagactgggcagtagatggtacaattactgatgctaatgttgcagttaaagctatctttaccttgcaagaaaaacaaacggatggtacatgggtgaacgttgcttcacacgaagcaacaaaaccatcacgctttgaacatactttcacaggtttggataatgctaaaacttaccgcgttgtcgaacgtgttagcggctacactccagaatacgtatcatttaaaaatggtgttgtgactatcaagaacaacaaaaactcaaatgatccaactccaatcaacccatcagaaccaaaagtggtgacttatggacgtaaatttgtgaaaacaaatcaagctaacactgaacgcttggcaggagctaccttcctcgttaagaaagaaggcaaatacttggcacgtaaagcaggtgcagcaactgctgaagcaaaggcagctgtaaaaactgctaaactagcattggatgaagctgttaaagcttataacgacttgactaaagaaaaacaagaaggccaagaaggtaaaacagcattggctactgttgatcaaaaacaaaaagcttacaatgacgcttttgttaaagctaactactcatatgaatgggttgcagataaaaaggctgataatgttgttaaattgatctctaacgccggtggtcaatttgaaattactggtttggataaaggcacttatggcttggaagaaactcaagcaccagcaggttatgcgacattgtcaggtgatgtaaactttgaagtaactgccacatcatatagcaaaggggctacaactgacatcgcatatgataaaggctctgtaaaaaaagatgcccaacaagttcaaaacaaaaaagtaaccatcccacaaacaggtggtattggtacaattcttttcacaattattggtttaagcattatgcttggagcagtagttatcatgaaaaaacgtcaatcagaggaagcttaa

SEQ ID NO: 128 - protein, 674 aa, Streptococcus agalactiae
MKKINKCLTMFSTLLLILTSLFSVAPAFADDATTDTVTLHKIVMPQAAFDNFTEGTKGKNDSDYVGKQINDLKSYFGSTDAKEIKGAFFVFKNETGTKFITENGKEVDTLEAKDAEGGAVLSGLTKDNGFVFNTAKLKGIYQIVELKEKSNYDNNGSILADSKAVPVKITLPLVNNQGVVKDAHIYPKNTETKPQVDKNFADKDLDYTDNRKDKGVVSATVGDKKEYIVGTKILKGSDYKKLVWTDSMTKGLTFNNNVKVTLDGEDFPVLNYKLVTDDQGFRLALNATGLAAVAAAAKDKDVEIKITYSATVNGSTTVEIPETNDVKLDYGNNPTEESEPQEGTPANQEIKVIKDWAVDGTITDANVAVKAIFTLQEKQTDGTWVNVASHEATKPSRFEHTFTGLDNAKTYRVVERVSGYTPEYVSFKNGVVTIKNNKNSNDPTPINPSEPKVVTYGRKFVKTNQANTERLAGATFLVKKEGKYLARKAGAATAEAKAAVKTAKLALDEAVKAYNDLTKEKQEGQEGKTALATVDQKQKAYNDAFVKANYSYEWVADKKADNVVKLISNAGGQFEITGLDKGTYGLEETQAPAGYATLSGDVNFEVTATSYSKGATTDIAYDKGSVKKDAQQVQNKKVTIPQTGGIGTILFTIIGLSIMLGAVVIMKKRQSEEA

SEQ ID NO: 129 - protein, 5 aa, Artificial
  sortase substrate motif
IPQTG

SEQ ID NO: 130 - protein, 5 aa, Artificial
  sortase substrate motif
LPKTG

SEQ ID NO: 131 - protein, 5 aa, Artificial
  sortase substrate motif
LPSTG

SEQ ID NO: 132 - protein, 5 aa, Artificial
  sortase substrate motif
LPFTG

SEQ ID NO: 133 - protein, 5 aa, Artificial
  sortase substrate motif
  misc_feature (3)..(3): X = any amino acid residue
IPXTG

SEQ ID NO: 134 - protein, 5 aa, Artificial
  sortase substrate motif
  misc_feature (3)..(3): X = any amino acid residue
LPXSG

SEQ ID NO: 135 - protein, 5 aa, Artificial
  sortase substrate motif
  misc_feature (3)..(3): X = any amino acid residue
VVXTG

SEQ ID NO: 136 - protein, 5 aa, Artificial
  sortase substrate motif
  misc_feature (3)..(3): X = any amino acid residue
EVXTG

SEQ ID NO: 137 - protein, 5 aa, Artificial
  sortase substrate motif
  misc_feature (3)..(3): X = any amino acid residue
VPXTG

SEQ ID NO: 138 - protein, 5 aa, Artificial
  sortase substrate motif
  misc_feature (3)..(3): X = any amino acid residue
QVXTG

SEQ ID NO: 139 - protein, 5 aa, Artificial
  sortase substrate motif
  misc_feature (3)..(3): X = any amino acid residue
LPXAG

SEQ ID NO: 140 - protein, 5 aa, Artificial
  sortase substrate motif
QVPTG

SEQ ID NO: 141 - protein, 5 aa, Artificial
  sortase substrate motif
  misc_feature (3)..(3): X = any amino acid residue
FPXTG

SEQ ID NO: 142 - protein, 5 aa, Artificial
  sortase substrate motif
NPQTN

SEQ ID NO: 143 - protein, 6 aa, Artificial
  substrate sortase motif
  misc_feature (1)..(3): X = any amino acid residue
XPXTGG

SEQ ID NO: 144 - protein, 6 aa, Artificial
  sortase substrate motif
  misc_feature (1)..(6): X = any amino acid residue
LPXTAX

SEQ ID NO: 145 - protein, 6 aa, Artificial
  sortase substrate motif
  misc_feature (1)..(6): X = any amino acid residue
LAXTGX

SEQ ID NO: 146 - protein, 15 aa, Artificial
  pilin motif
  misc_feature (1)..(15): X = any amino acid residue
YPKNXXXXXXXXXXK

SEQ ID NO: 147 - protein, 14 aa, Artificial
  pilin motif
  misc_feature (1)..(14): X = any amino acid residue
YPKNXXXXXXXXXK

SEQ ID NO: 148 - protein, 11 aa, Artificial
  pilin motif
  misc_feature (1)..(11): X = any amino acid residue
YPKXXXXXXXK

SEQ ID NO: 149 - protein, 15 aa, Artificial
  pilin motif
  misc_feature (1)..(15): X = any amino acid residue
YPKXXXXXXXXXXXK

SEQ ID NO: 150 - protein, 13 aa, Artificial
  pilin motif
  misc_feature (1)..(13): X = any amino acid residue
PKNXXXXXXXXXK

SEQ ID NO: 151 - protein, 10 aa, Artificial
  pilin motif
  misc_feature (1)..(10): X = any amino acid residue
WXXXVXVYPK

SEQ ID NO: 152 - protein, 12 aa, Artificial
  E box motif
  misc_feature (1)..(12): X = any amino acid residue
YXLXETXAPXGY

SEQ ID NO: 153 - protein, 12 aa, Artificial
  E box motif
  misc_feature (1)..(12): X = any amino acid residue
YXLXEXXXXXGY

SEQ ID NO: 154 - protein, 12 aa, Artificial
  E box motif
  misc_feature (1)..(12): X = any amino acid residue
YXLXEXXXPXGY

SEQ ID NO: 155 - protein, 12 aa, Artificial
  E box motif
YKLKETKAPEGY

SEQ ID NO: 156 - protein, 12 aa, Artificial
  E box motif
YVLKEIETQSGY

SEQ ID NO: 157 - protein, 12 aa, Artificial
  E box motif
YKLYEISSPDGY

SEQ ID NO: 158 - protein, 13 aa, Artificial
  pilin motif
  misc_feature (1)..(13): X = any amino acid residue
YPKNXXXXXXXXK

SEQ ID NO: 159 - protein, 11 aa, artificial
  pilin motif
  misc_feature (1)..(11): X = any amino acid residue
PKXXXXXXXXK

SEQ ID NO: 160 - protein, 13 aa, Artificial
  pilin motif
  misc_feature (1)..(13): X = any amino acid residue
YPKXXXXXXXXXK

SEQ ID NO: 161 - protein, 12 aa, Artificial
  pilin motif
  misc_feature (1)..(12): X = any amino acid residue
PKNXXXXXXXXK

SEQ ID NO: 162 - protein, 13 aa, Artificial
  pilin motif
  misc_feature (1)..(13): X = any amino acid residue
PKXXXXXXXXXXK

SEQ ID NO: 163 - protein, 11 aa, Artificial
  E box motif
  misc_feature (1)..(11): X = any amino acid residue
YXLXETXAPXG

SEQ ID NO: 164 - protein, 12 aa, Artificial
  E box motif
  misc_feature (1)..(12): X = any amino acid residue
YXXXEXXAXXGY

SEQ ID NO: 165 - protein, 12 aa, Artificial
  E box motif
  misc_feature (1)..(12): X = any amino acid residue
YXLXEXXXPXDY

SEQ ID NO: 166 - protein, 5 aa, Artificial
  sortase substrate motif
LPSTG

SEQ ID NO: 167 - protein, 5 aa, Artificial
  sortase substrate motif
  misc_feature (2)..(2): X = P or V
VXPTG

SEQ ID NO: 168 - protein, 5 aa, Artificial
  sortase substrate motif
NPKTN

SEQ ID NO: 169 - protein, 5 aa, Artificial
  sortase substrate motif
NPQTG

SEQ ID NO: 170 - protein, 5 aa, Artificial
  sortase substrate motif
NPKTG

SEQ ID NO: 171 - protein, 420 aa, Streptococcus pneumoniae
MEHINHTTLLIGIKDKNITLNKAIQHDTHIEVFATLDYHPPKCKHCKGKQIKYDFQKPSKIPFIEIGGFPSLIHLKKRRFQCKSCRKVTVAETTLVQKNCQISEMVRQKIAQLLLNREALTHIASKLAISTSTSTVYRKLKQFHFQEDYTTLPEILSWDEFSYQKGKLAFIAQDFNTKKIMTILDNRRQTTIRNHFFKYSKEARKKVKVVTVDMSGSYIPLIKKLFPNAKIVLDRFHIVQHMSRALNQTRINIMKQFDDKSLEYRALKYYWKFILKDSRKLSLKPFYARTFRETLTPRECLKKIFTLVPELKDYYDLYQLLLFHLQEKNTDQFWGLIQDTLPHLNRTFKTTLSTFICYKNYITNAIELPYSNAKLEATNKLIKDIKRNAFGFRNFENFKKRIFIALNIKKERTKFVLSRA

SEQ ID NO: 172 - protein, 509 aa, Streptococcus pneumoniae; identical to SEQ ID NO: 87

SEQ ID NO: 173 - protein, 890 aa, Streptococcus pneumoniae
MLNRETHMKKVRKIFQKAVAGLCCISQLTAFSSIVALAETPETSPAIGKVVIKETGEGGALLGDAVFELKNNTDGTTVSQRTEAQTGEAIFSNIKPGTYTLTEAQPPVGYKPSTKQWTVEVEKNGRTTVQGEQVENREEALSDQYPQTGTYPDVQTPYQIIKVDGSEKNGQHKALNPNPYERVIPEGTLSKRIYQVNNLDDNQYGIELTVSGKTTVETKEASTPLDVVILLDNSNSMSNIRHNHAHRAEKAGEATRALVDKITSNPDNRVALVTYGSTIFDGSEATVEKGVADANGKILNDSALWTFDRTTFTAKTYNYSFLNLTSDPTDIQTIKDRIPSDAEELNKDKLMYQFGATFTQKALMTADDILTKQARPNSKKVIFHITDGVPTMSYPINFKYTGTTQSYRTQLNNFKAKTPNSSGILLEDFVTWSADGEHKIVRGDGESYQMFTKKPVTDQYGVHQILSITSMEQRAKLVSAGYRFYGTDLYLYWRDSILAYPFNSSTDWITNHGDPTTWYYNGNMAQDGYDVFTVGVGVNGDPGTDEATATRFMQSISSSPDNYTNVADPSQILQELNRYFYTIVNEKKSIENGTITDPMGELIDFQLGADGRFDPADYTLTANDGSSLVNNVPTGGPQNDGGLLKNAKVFYDTTEKRIRVTGLYLGTGEKVTLTYNVRLNDQFVSNKFYDTNGRTTLHPKEVEKNTVRDFPIPKIRDVRKYPEITIPKEKKLGEIEFIKINKNDKKPLRDAVFSLQKQHPDYPDIYGAIDQNGTYQNVRTGEDGKLTFKNLSDGKYRLFENSEPAGYKPVQNKPIVAFQIVNGEVRDVTSIVPQDIPAGYEFTNDKHYITNEPIPPKREYPRTGGIGMLPFYLIGCMMMGGVLLYTRKHP

SEQ ID NO: 174 - protein, 644 aa, Streptococcus pneumoniae
MKSINKFLTMLAALLLTASSLFSAATVFAADNVSTAPDAVTKTLTIHKLLLSEDDLKTWDTNGPKGYDGTQSSLKDLTGVVAEEIPNVYFELQKYNLTDGKEKENLKDDSKWTTVHGGLTTKDGLKIETSTLKGVYRIREDRTKTTYVGPNGQVLTGSKAVPALVTLPLVNNNGTVIDAHVFPKNSYNKPVVDKRIADTLNYNDQNGLSIGTKIPYVVNTTIPSNATFATSFWSDEMTEGLTYNEDVTITLNNVAMDQADYEVTKGNNGFNLKLTEAGLAKINGKDADQKIQITYSATLNSLAVADIPESNDITYHYGNHQDHGNTPKPTKPNNGQITVTKTWDSQPAPEGVKATVQLVNAKTGEKVGAPVELSENNWTYTWSGLDNSIEYKVEEEYNGYSAEYTVESKGKLGVKNWKDNNPAPINPEEPRVKTYGKKFVKVDQKDTRLENAQFVVKKADSNKYIAFKSTAQQAADEKAAATAKQKLDAAVAAYTNAADKQAAQALVDQAQQEYNVAYKEAKFGYVEVAGKDEAMVLTSNTDGQFQISGLAAGTYKLEEIKAPEGFAKIDDVEFVVGAGSWNQGEFNYLKDVQKNDATKVVNKKITIPQTGGIGTIIFAVAGAAIMGIAVYAYVKNNKDEDQLA

SEQ ID NO: 175 - protein, 401 aa, Streptococcus pneumoniae
MTMQKMQKMISRIFFVMALCFSLVWGAHAVQAQEDHTLVLQLENYQEVVSQLPSRDGHRLQVWKLDDSYSYDDRVQIVRDLHSWDENKLSSFKKTSFEMTFLENQIEVSHIPNGLYYVRSIIQTDAVSYPAEFLFEMTDQTVEPLVIVAKKTDTMTTKVKLIKVDQDHNRLEGVGFKLVSVARDGSEKEVPLIGEYRYSSSGQVGRTLYTDKNGEIFVTNLPLGNYRFKEVEPLAGYAVTTLDTDVQLVDHQLVTITVVNQKLPRGNVDFMKVDGRTNTSLQGAMFKVMKEESGHYTPVLQNGKEVVVTSGKDGRFRVEGLEYGTYYLWELQAPTGYVQLTSPVSFTIGKDTRKELVTVVKNNKRPRIDVPDTGEETLYILMLVAILLFGSGYYLTKKPNN

SEQ ID NO: 176 - protein, 304 aa, Streptococcus pneumoniae
MLIKMVKTKKQKRNNLLLGVVFFIGMAVMAYPLVSRLYYRVESNQQIADFDKEKATLDEADIDERMKLAQAFNDSLNNVVSGDPWSEEMKKKGRAEYARMLEIHERMGHVEIPVIDVDLPVYAGTAEEVLQQGAGHLEGTSLPIGGNSTHAVITAHTGLPTAKMFTDLTKLKVGDKFYVHNIKEVMAYQVDQVKVIEPTNFDDLLIVPGHDYVTLLTCTPYMINTHRLLVRGHRIPYVAEVEEEFIAANKLSHLYRYLFYVAVGLIVILLWIIRRLRKKKKQPEKALKALKAARKEVKVEDGQQ

SEQ ID NO: 177 - protein, 261 aa, Streptococcus pneumoniae
VSRYYYRIESNEVIKEFDETVSQMDKAELEERWRLAQAFNATLKPSEILDPFTEQEKKKGVSEYANMLKVHERIGYVEIPAIDQEIPMYVGTSEEILQKGAGLLEGASLPVGGENTHTVVTAHRGLPTAELFSQLDKMKKGDVFYLHVLDQVLAYQVDQILTVEPNDFEPVLIQHGEDYATLLTCTPYMINSHRLLVRGKRIPYTAPIAERNRAVRERGQFWLWLLLAALVMILVLSYGVYRHRRIVKGLEKQLEEHHVKG

SEQ ID NO: 178 - protein, 283 aa, Streptococcus pneumoniae
MSKAKLQKLLGYLLMLVALVIPVYCFGQMVLQSLGQVKGHEIFSESVTADSYQEQLQRSLDYNQRLDSQNRIVDPFLAEGYEVNYQVSDDPDAVYGYLSIPSLEIMEPVYLGADYHHLAMGLAHVDGTPLPVEGKGIRSVIAGHRAEPSHVFFRHLDQLKVGDALYYDNGQEIVEYQMMDTEIILPSEWEKLESVSSKNIMTLITCDPIPTFNKRLLVNFERVAVYQKSDPQTAAVARVAFTKEGQSVSRVATSQWLYRGLVVLAFLGILFVLWKLARLLRGK

SEQ ID NO: 179 - DNA, 869 bp, Streptococcus agalactiae
gctacaacagttcacggggagactgttgtaaacggagccaaactaacagttacaaaaaaccttgatttagttaatagcaatgcattaattccaaatacagattttacatttaaaatcgaacctgatactactgtcaacgaagacggaaataagtttaaaggtgtagctttgaacacaccgatgactaaagtcacttacaccaattcagataaaggtggatcaaatacgaaaactgcagaatttgatttttcagaagttacttttgaaaaaccaggtgtttattattacaaagtaactgaggagaagatagataaagttcctggtgtttcttatgatacaacatcttacactgttcaagttcatgtcttgtggaatgaagagcaacaaaaaccagtagctacttatattgttggttataaagaaggtagtaaggtgccaattcagttcaaaaatagcttagattctactacattaacggtgaagaaaaaagtttcaggtaccggtggagatcgctctaaagattttaattttggtctgactttaaaagcaaatcagtattataaggcgtcagaaaaagtcatgattgagaagacaactaaaggtggtcaagctcctgttcaaacagaggctagtatagatcaactctatcattttaccttgaaagatggtgaatcaatcaaagtcacaaatcttccagtaggtgtggattatgttgtcactgaagacgattacaaatcagaaaaatatacaaccaacgtggaagttagtcctcaagatggagctgtaaaaaatatcgcaggtaattcaactgaacaagagacatctactgataaagatatgaccattacttttacaaataaaaaagattt

SEQ ID NO: 180 - protein, 5 aa, Artificial
  sortase substrate motif
LPATG

SEQ ID NO: 181 - protein, 5 aa, Artificial
  sortase substrate motif
LPSSG

SEQ ID NO: 182 - protein, 5 aa, Artificial
  sortase substrate motif
VVPTG

SEQ ID NO: 183 - protein, 5 aa, Artificial
  sortase substrate motif
EVPTG

SEQ ID NO: 184 - protein, 5 aa, Artificial
  sortase substrate motif
VPPTG

SEQ ID NO: 185 - protein, 5 aa, Artificial
  sortase substrate motif
LPLAG

SEQ ID NO: 186 - protein, 5 aa, Artificial
  sortase substrate motif
  misc_feature (3)..(3): X = any amino acid residue
YPXTG

SEQ ID NO: 187 - protein, 509 aa, Streptococcus pneumoniae; identical to SEQ ID NO: 87

SEQ ID NO: 188 - protein, 883 aa, Streptococcus pneumoniae
MKKVRKIFQKAVAGLCCISQLTAFSSIVALAETPETSPAIGKVVIKETGEGGALLGDAVFELKNNTDGTTVSQRTEAQTGEAIFSNIKPGTYTLTEAQPPVGYKPSTKQWTVEVEKNGRTTVQGEQVENREEALSDQYPQTGTYPDVQTPYQIIKVDGSEKNGQHKALNPNPYERVIPEGTLSKRIYQVNNLDDNQYGIELTVSGKTTVETKEASTPLDVVILLDNSNSMSNIRHNHAHRAEKAGEATRALVDKITSNPDNRVALVTYGSTIFDGSEATVEKGVADANGKILNDSALWTFDRTTFTAKTYNYSFLNLTSDPTDIQTIKDRIPSDAEELNKDKLMYQFGATFTQKALMTADDILTKQARPNSKKVIFHITDGVPTMSYPINFKYTGTTQSYRTQLNNFKAKTPNSSGILLEDFVTWSADGEHKIVRGDGESYQMFTKKPVTDQYGVHQILSITSMEQRAKLVSAGYRFYGTDLYLYWRDSILAYPFNSSTDWITNHGDPTTWYYNGNMAQDGYDVFTVGVGVNGDPGTDEATATRFMQSISSSPDNYTNVADPSQILQELNRYFYTIVNEKKSIENGTITDPMGELIDFQLGADGRFDPADYTLTANDGSSLVNNVPTGGPQNDGGLLKNAKVFYDTTEKRIRVTGLYLGTGEKVTLTYNVRLNDQFVSNKFYDTNGRTTLHPKEVEKNTVRDFPIPKIRDVRKYPEITIPKEKKLGEIEFIKINKNDKKPLRDAVFSLQKQHPDYPDIYGAIDQNGTYQNVRTGEDGKLTFKNLSDGKYRLFENSEPAGYKPVQNKPIVAFQIVNGEVRDVTSIVPQDIPAGYEFTNDKHYITNEPIPPKREYPRTGGIGMLPFYLIGCMMMGGVLLYTRKNP

SEQ ID NO: 189 - protein, 644 aa, Streptococcus pneumoniae
  misc_feature (267)..(267): Xaa can be any naturally occurring amino acid
MKSINKFLTMLAALLLTASSLFSAATVFAADNVSTAPDAVTKTLTIHKLLLSEDDLKTWDTNGPKGYDGTQSSLKDLTGVVAEEIPNVYFELQKYNLTDGKEKENLKDDSKWTTVHGGLTTKDGLKIETSTLKGVYRIREDRTKTTYVGPNGQVLTGSKAVPALVTLPLVNNNGTVIDAHVFPKNSYNKPVVDKRIADTLNYNDQNGLSIGTKIPYVVNTTIPSNATFATSFWSDEMTEGLTYNEDVTITLNNVAMDQADYEVTKGXNGFNLKLTEAGLAKINGKDADQKIQITYSATLNSLAVADIPESNDITYHYGNHQDHGNTPKPTKPNNGQITVTKTWDSQPAPEGVKATVQLVNAKTGEKVGAPVELSENNWTYTWSGLDNSIEYKVEEEYNGYSAEYTVESKGKLGVKNWKDNNPAPINPEEPRVKTYGKKFVKVDQKDTRLENAQFVVKKADSNKYIAFKSTAQQAADEKAAATAKQKLDAAVAAYTNAADKQAAQALVDQAQQEYNVAYKEAKFGYVEVAGKDEAMVLTSNTDGQFQISGLAAGTYKLEEIKAPEGFAKIDDVEFVVGAGSWNQGEFNYLKDVQKNDATKVVNKKITIPQTGGIGTIIFAVAGAAIMGIAVYAYVKNNKDEDQLA

SEQ ID NO: 190 - protein, 401 aa, Streptococcus pneumoniae; identical to SEQ ID NO: 175

SEQ ID NO: 191 - protein, 304 aa, Streptococcus pneumoniae; identical to SEQ ID NO: 176

SEQ ID NO: 192 - protein, 297 aa, Streptococcus pneumoniae
MDNSRRSRKKGTKKKKHPLILLLIFLVGFAVAIYPLVSRYYYRIESNEVIKEFDETVSQMDKAELEERWRLAQAFNATLKPSEILDPFTEQEKKKGVSEYANMLKVHERIGYVEIPAIDQEIPMYVGTSEEILQKGAGLLEGASLPVGGENTHTVVTAHRGLPTAELFSQLDKMKKGDVFYLHVLDQVLAYQVDQILTVEPNDFEPVLIQHGEDYATLLTCTPYMINSHRLLVRGKRIPYTAPIAERNRAVRERGQFWLWLLLAALVMILVLSYGVYRHRRIVKGLEKQLEEHHVKG

SEQ ID NO: 193 - protein, 283 aa, Streptococcus pneumoniae
MSKAKLQKLLGYLLMLVALVIPVYCFGQMVLQSLGQVKGHEIFSESVTADSYQEQLQRSLDYNQRLDSQNRIVDPFLAEGYEVNYQVSDDPDAVYGYLSIPSLEIMEPVYLGADYHHLAMGLAHVDGTPLPVEGKGIRSVIAGHRAEPSHVFFRHLDQLKVGDALYYDNGQEIVEYQMMDTEIILPSEWEKLESVSSKNIMTLITCDPIPTFNKRLLVNFERVAVYQKSDPQTAAVARVAFTKEGQSVSRVATSQWLYRGLVVLAFMGILFVLWKLARLLRGK

SEQ ID NO: 194 - protein, 509 aa, Streptococcus pneumoniae; identical to SEQ ID NO: 87

SEQ ID NO: 195 - protein, 883 aa, Streptococcus pneumoniae
MKKVRKIFQKAVAGLCCISQLTAFSSIVALAETPETSPAIGKVVIKETGEGGALLGDAVFELKNNTDGTTVSQRTEAQTGEAIFSNIKPGTYTLTEAQPPVGYKPSTKQWTVEVEKNGRTTVQGEQVENREEALSDQYPQTGTYPDVQTPYQIIKVDGSEKNGQHKALNPNPYERVIPEGTLSKRIYQVNNLDDNQYGIELTVSGKTTVETKEASTPLDVVILLDNSNSMSNIRHNHAHRAEKAGEATRALVDKITSNPDNRVALVTYGSTIFDGSEATVEKGVADANGKILNDSALWTFDRTTFTAKTYNYSFLNLTSDPTDIQTIKDRIPSDAEELNKDKLMYQFGATFTQKALMTADDILTKQARPNSKKVIFHITDGVPTMSYPINFKYTGTTQSYRTQLNNFKAKTPNSSGILLEDFVTWSADGEHKIVRGDGESYQMFTKKPVTDQYGVHQILSITSMEQRAKLVSAGYRFYGTDLYLYWRDSILAYPFNSSTDWITNHGDPTTWYYNGNMAQDGYDVFTVGVGVNGDPGTDEATATRFMQSISSSPDNYTNVADPSQILQELNRYFYTIVNEKKSIENGTITDPMGELIDFQLGADGRFDPADYTLTANDGSSLVNNVPTGGPQNDGGLLKNAKVFYDTTEKRIRVTGLYLGTGEKVTLTYNVRLNDQFVSNKFYDTNGRTTLHPKEVEKNTVRDFPIPKIRDVRKYPEITIPKEKKLGEIEFIKINKNDKKPLRDAVFSLQKQHPDYPDIYGAIDQNGTYQNVRTGEDGKLTFKNLSDGKYRLFENSEPAGYKPVQNKPIVAFQIVNGEVRDVTSIVPQDIPAGYEFTNDKHYITNEPIPPKREYPRTGGIGMLPFYLIGCMMMGGVLLYTRKHP

SEQ ID NO: 196 - protein, 644 aa, Streptococcus pneumoniae; identical to SEQ ID NO: 174

SEQ ID NO: 197 - protein, 401 aa, Streptococcus pneumoniae; identical to SEQ ID NO: 175

SEQ ID NO: 198 - protein, 304 aa, Streptococcus pneumoniae; identical to SEQ ID NO: 176

SEQ ID NO: 199 - protein, 297 aa, Streptococcus pneumoniae; identical to SEQ ID NO: 192

SEQ ID NO: 200 - protein, 283 aa, Streptococcus pneumoniae; identical to SEQ ID NO: 178

SEQ ID NO: 201 - protein, 509 aa, Streptococcus pneumoniae; identical to SEQ ID NO: 87

SEQ ID NO: 202 - protein, 883 aa, Streptococcus pneumoniae; identical to SEQ ID NO: 195

SEQ ID NO: 203 - protein, 644 aa, Streptococcus pneumoniae; identical to SEQ ID NO: 174

SEQ ID NO: 204 - protein, 401 aa, Streptococcus pneumoniae; identical to SEQ ID NO: 175

SEQ ID NO: 205 - protein, 304 aa, Streptococcus pneumoniae; identical to SEQ ID NO: 176

SEQ ID NO: 206 - protein, 297 aa, Streptococcus pneumoniae; identical to SEQ ID NO: 192

SEQ ID NO: 207 - protein, 283 aa, Streptococcus pneumoniae; identical to SEQ ID NO: 178

SEQ ID NO: 208 - protein, 509 aa, Streptococcus pneumoniae; identical to SEQ ID NO: 87

SEQ ID NO: 209 - protein, 886 aa, Streptococcus pneumoniae
MKKVRKIFQKAVAGLCCISQLTAFSSIVALAETPETSPAIGKVVIKETGEGGALLGDAVFELKNNTNGTTVSQRTEAQTGEAIFSNIKPGTYTLTEAQPPVGYKPSTKQRTVEVEKNGRTTVQGEQVENREEALSDQYPQTGTYPDVQTPYQIIKVDGSEKNGQHKALNPNPYERVIPEGTLSKRIYQVNNLDDNQYGIELTVSGKTVYERKDKSVPLDVVILLDNSNSMSNIRNKNARRAERAGEATRSLIDKITSDPENRVALVTYASTIFDGTEFTVEKGVADKNGKRLNDSLFWNYDQTSFTTNTKDYSYLKLTNDKNDIVELKNKVPTEAEDHDGNRLMYQFGATFTQKALMKADEILTQQARQNSQKVIFHITDGVPTMSYPINFNHATFAPSYQNQLNAFFSKSPNKDGILLSDFITQATSGEHTIVRGDGQSYQMFTDKTVYEKGAPAAFPVKPEKYSEMKAVGYAVIGDPINGGYIWLNWRESILAYPFNSNTAKITNHGDPTRWYYNGNIAPDGYDVFTVGIGINGDPGTDEATATSFMQSISSKPENYTNVTDTTKILEQLNRYFHTIVTEKKSIENGTITDPMGELIDLQLGTDGRFDPADYTLTANDGSRLENGQAVGGPQNDGGLLKNAKVFYDTTEKRIRVTGLYLGTGEKVTLTYNVRLNDQFVSNKFYDTNGRTTLHPKEVEKNTVRDFPIPKIRDVRKYPAITIAKEKKLGEIEFIKINKNDKKPLRDAVFSLQKQHPDYPDIYGAIDQNGTYQNVRTGEDGKLTFKNLSDGKYRLFENSEPAGYKPVQNKPIVAFQIVNGEVRDVTSIVPQDIPAGYEFTNDKHYITNEPIPPKREYPRTGGIGMLLFYLIGCMMMGGVLLYTRKHP

SEQ ID NO: 210 - protein, 665 aa, Streptococcus pneumoniae
MKSINKFLTMLAALLLTASSLFSAATVFAAGTTTTSVTVHKLLATDGDMDKIANELETGNYAGNKVGVLPANAKEIAGVMFVWTNTNNEIIDENGQTLGVNIDPQTFKLSGAMPATAMKKLTEAEGAKFNTANLPAAKYKIYEIHSLSTYVGEDGATLTGSKAVPIEIELPLNDVVDAHVYPKNTEAKPKIDKDFKGKANPDTPRVDKDTPVNHQVGDVVEYEIVTKIPALANYATANWSDRMTEGLAFNKGTVKVTVDDVALEAGDYALTEVATGFDLKLTDAGLAKVNDQNAEKTVKITYSATLNDKAIVEVPESNDVTFNYGNNPDHGNTPKPNKPNENGDLTLTKTWVDATGAPIPAGAEATFDLVNAQTGKVVQTVTLTTDKNTVTVNGLDKNTEYKFVERSIKGYSADYQEITTAGEIAVKNWKDENPKPLDPTEPKVVTYGKKFVKVNDKDNRLAGAEFVIANADNAGQYLARKADKVSQEEKQLVVTTKDALDRAVAAYNALTAQQQTQQEKEKVDKAQAAYNAAVIAANNAFEWVADKDNENVVKLVSDAQGRFEITGLLAGTYYLEETKQPAGYALLTSRQKFEVTATSYSATGQGIEYTAGSGKDDATKVVNKKITIPQTGGIGTIIFAVAGAVIMGIAVYAYVKNNKDEDQLA

SEQ ID NO: 211 - protein, 413 aa, Streptococcus pneumoniae
MTMQKMQKMQKMQKMQKMQKMISRIFFVMALCFSLVWGAHAVQAQEDHTLVLQLENYQEVVSQLPSRDGHRLQVWKLDDSYSYDNRVQIVRDLHSWDENKLSSFKKTSFEMTFLENQIEVSHIPNGLYYVRSIIQTDAVSYPAEFLFEMTDQTVEPLVIVAKKADTVTTKVKLIKVDQDHNRLEGVGFKLVSVARDGSEKEVPLIGEYRYSSSGQVGRTLYTDKNGEIVVTNLPLGTYRFKEVEPLAGYTVTTMDTDVQLVDHQLVTITVVNQKLPRGNVDFMKVDGRTNTSLQGAMFKVMKEENGHYTPVLQNGKEVVVASGKDGRFRVEGLEYGTYYLWELQAPTGYVQLTSPVSFTIGKDTRKELVTVVKNNKRPRIDVPDTGEETLYILMLVAILLFGSGYYLTKKTNN

SEQ ID NO: 212 - protein, 302 aa, Streptococcus pneumoniae
MLIKMAKTKKQKRNNLLLGVVFFIGIAVMAYPLVSRLYYRVESNQQIADFDKEKATLDEADIDERMKLAQAFNDSLNNVVSGDPWSEEMKKKGRAEYARMLEIHERMGHVEIPAIDVDLPVYAGTAEEVLQQGAGHLEGTSLPIGGNSTHAVITAHTGLPTAKMFTDLTKLKVGDKFYVHNIKEVMAYQVDQVKVIEPTNFDDLLIVPGHDYVTLLTCTPYMINTHRLLVRGHRIPYVAEVEEEFIAANKLSHLYRYLFYVAVGLIVILLWIIRRLRKKKRQSERALKALKEATKEVKVEDE

SEQ ID NO: 213 - protein, 297 aa, Streptococcus pneumoniae
MSKSRYSRKKSVKKKKNPFILLLIFLVGLAVAMYPLVSRYYYRIESNEVIKEFDETVSQMDKAELEERWRLAQAFNATLKPSEILDPFTEQEKKKGVSEYANMLKVHERIGYVEIPAIDQEIPMYVGTSEEILQKGAGLLEGASLPVGGENTHTVVTAHRGLPTAELFSQLDKMKKGDIFYLHVLDQVLAYQVDQIVTVEPNDFEPVLIQHGEDYATLLTCTPYMINSHRLLVRGKRIPYTAPIAERNRAVRERGQFWLWLLLGAMAVILLLLYRVYRNRRIVKGLEKQLEGRHVKD

SEQ ID NO: 214 - protein, 283 aa, Streptococcus pneumoniae; identical to SEQ ID NO: 80

SEQ ID NO: 215 - protein, 509 aa, Streptococcus pneumoniae; identical to SEQ ID NO: 87

SEQ ID NO: 216 - protein, 883 aa, Streptococcus pneumoniae; identical to SEQ ID NO: 195

SEQ ID NO: 217 - protein, 644 aa, Streptococcus pneumoniae; identical to SEQ ID NO: 174

SEQ ID NO: 218 - protein, 401 aa, Streptococcus pneumoniae; identical to SEQ ID NO: 175

SEQ ID NO: 219 - protein, 304 aa, Streptococcus pneumoniae; identical to SEQ ID NO: 176

SEQ ID NO: 220 - protein, 297 aa, Streptococcus pneumoniae; identical to SEQ ID NO: 192

SEQ ID NO: 221 - protein, 283 aa, Streptococcus pneumoniae; identical to SEQ ID NO: 178

SEQ ID NO: 222 - protein, 509 aa, Streptococcus pneumoniae; identical to SEQ ID NO: 87

SEQ ID NO: 223 - protein, 886 aa, Streptococcus pneumoniae
MKKVRKIFQKAVAGLCCISQLTAFSSIVALAETPETSPAIGKVVIKETGEGGALLGDAVFELKNNTDGTTVSQRTEAQTGEAIFSNIKPGTYTLTEAQPPVGYKPSTKQWTVEVEKNGRTTVQGEQVENREEALSDQYPQTGTYPDVQTPYQIIKVDGSEKNGQHKALNPNPYERVIPEGTLSKRIYQVNNLDDNQYGIELTVSGKTVYERKDKSVPLDVVILLDNSNSMSNIRNKNARRAERAGEATRSLIDKITSDPENRVALVTYASTIFDGTEFTVEKGVADKNGKRLNDSLFWNYDQTSFTTNTKDYSYLKLTNDKNDIVELKNKVPTEAEDHDGNRLMYQFGATFTQKALMKADEILTQQARQNSQKVIFHITDGVPTMSYPINFNHATFAPSYQNQLNAFFSKSPNKDGILLSDFITQATSGEHTIVRGDGQSYQMFTDKTVYEKGAPAAFPVKPEKYSEMKAVGYAVIGDPINGGYIWLNWRESILAYPFNSNTAKITNHGAPTRWYYNGNIAPDGYDVFTVGIGINGDPGTDEATATSFMQSISSKPENYTNVTDTTKILEQLNRYFHTIVTEKKSIENGTITDPMGELIDLQLGTDGRFDPADYTLTANDGSRLENGQAVGGPQNDGGLLKNAKVFYDTTEKRIRVTGLYLGTGEKVTLTYNVRLNDQFVSNKFYDTNGRTTLHPKEVEKNTVRDFPIPKIRDVRKYPAITIAKEKKLGEIEFIKINKNDKKPLRDAVFSLQKQHPDYPDIYGAIDQNGTYQNVRTGEDGKLTFKNLSDGKYRLFENSEPAGYKPVQNKPIVAFQIVNGEVRDVTSIVPQDIPAGYEFTNDKHYITNEPIPPKREYPRTGGIGMLPFYLIGCMMMGGVLLYTRKHP

SEQ ID NO: 224 - protein, 665 aa, Streptococcus pneumoniae; identical to SEQ ID NO: 210

SEQ ID NO: 225 - protein, 401 aa, Streptococcus pneumoniae
MTMQKMQKMISRIFFVMALCFSLVWGAHAVQAQEDHTLVLQLENYQEVVSQLPSRDGHRLQVWKLDDSYSYDNRVQIVRDLHSWDENKLSSFKKTSFEMTFLENQIEVSHIPNGLYYVRSIIQTDAVSYPAEFLFEMTDQTVEPLVIVAKKADTVTTKVKLIKVDQDHNRLEGVGFKLVSVARDGSEKEVPLIGEYRYSSSGQVGRTLYTDKNGEIVVTNLPLGTYRFKEVEPLAGYTVTTMDTDVQLVDHQLVTITVVNQKLPRGNVDFMKVDGRTNTSLQGAMFKVMKEENGHYTPVLQNGKEVVVASGKDGRFRVEGLEYGTYYLWELQAPTGYVQLTSPVSFTIGKDTRKELVTVVKNNKRPRIDVPDTGEETLYILMLVAILLFGSGYYLTKKTNN

SEQ ID NO: 226 - protein, 302 aa, Streptococcus pneumoniae
MLIKMAKTKKQKRNNLLLGVVFFIGMAVMAYPLVSRLYYRVESNQQIADFDKEKATLDEADIDERMKLAQAFNDSLNNVVSGDPWSEEMKKKGRAEYARMLEIHERMGHVEIPAIDVDLPVYAGTAEEVLQQGAGHLEGTSLPIGGNSTHAVITAHTGLPTAKMFTDLTKLKVGDKFYVHNIKEVMAYQVDQVKVIEPTNFDDLLIVPGHDYVTLLTCTPYMINTHRLLVRGHRIPYVAEVEEEFIAANKLSHLYRYLFYVAVGLIVILLWIIRRLRKKKRQSERALKALKEATKEVKVEDE

SEQ ID NO: 227 - protein, 297 aa, Streptococcus pneumoniae
MSKSRYSRKKSVKKKKNPFILLLIFLVGLAVAMYPLVSRYYYRIESNEVIKEFDETVSQMDKAELEERWRLAQAFNATLKPSEILDPFTDQEKKQGVSEYANMLKVHERIGYVEIPAIEQEIPMYVGTSEDILQKGAGLLEGASLPVGGENTHTVITAHRGLPTAELFSQLDKMKKGDIFYLHVLDQVLAYQVDQIVTVEPNDFEPVLIQHGQDYATLLTCTPYMINSHRLLVRGKRIPYTAPIAERNRAVRERGQFWLWLLLGAMAVILLLLYRVYRNRRIVKGLEKQLEGRHVKD

SEQ ID NO: 228 - protein, 283 aa, Streptococcus pneumoniae; identical to SEQ ID NO: 80

SEQ ID NO: 229 - protein, 509 aa, Streptococcus pneumoniae; identical to SEQ ID NO: 87

SEQ ID NO: 230 - protein, 886 aa, Streptococcus pneumoniae
MKKVRKIFQKAVAGLCCISQLTAFSSIVALAETPETSPAIGKVVIKETGEGGALLGDAVFELKNNTDGTTVSQRTEAQTGEAIFSNIKPGTYTLTEAQPPVGYKPSTKQWTVEVEKNGRTTVQGEQVENREEALSDQYPQTGTYPDVQTPYQIIKVDGSEKNGQHKALNPNPYERVIPEGTLSKRIYQVNNLDDNQYGIELTVSGKTVYEQKDKSVPLDVVILLDNSNSMSNIRNKNARRAERAGEATRSLIDKITSDPENRVALVTYASTIFDGTEFTVEKGVADKNGKRLNDSLFWNYDQTSFTTNTKDYSYLKLTNDKNDIVELKNKVPTEAEDHDGNRLMYQFGATFTQKALMKADEILTQQARQNSQKVIFHITDGVPTMSYPINFNHATFAPSYQNQLNAFFSKSPNKDGILLSDFITQATSGEHTIVRGDGQSYQMFTDKTVYEKGAPAAFPVKPEKYSEMKAAGYAVIGDPINGGYIWLNWRESILAYPFNSNTAKITNHGDPTRWYYNGNIAPDGYDVFTVGIGINGDPGTDEATATSFMQSISSKPENYTNVTDTTKILEQLNRYFHTIVTEKKSIENGTITDPMGELIDLQLGTDGRFDPADYTLTANDGSRLENGQAVGGPQNDGGLLKNAKVLYDTTEKRIRVTGLYLGTDEKVTLTYNVRLNDEFVSNKFYDTNGRTTLHPKEVEQNTVRDFPIPKIRDVRKYPEITISKEKKLGDIEFIKVNKNDKKPLRDAVFSLQKQHPDYPDIYGAIDQNGTYQNVRTGEDGKLTFKNLSDGKYRLFENSEPAGYKPVQNKPIVAFQIVNGEVRDVTSIVPQDIPAGYEFTNDKHYITNEPIPPKREYPRTGGIGMLPFYLIGCMMMGGVLLYTRKHP

SEQ ID NO: 231 - protein, 654 aa, Streptococcus pneumoniae
MKSINKFLTILAALLLTVSSLFSAATVFAAEQKTKTLTVHKLLMTDQELDAWNSDAITTAGYDGSQNFEQFKQLQGVPQGVTEISGVAFELQSYTGPQGKEQENLTNDAVWTAVNKGVTTETGVKFDTEVLQGTYRLVEVRKESTYVGPNGKVLTGMKAVPALITLPLVNQNGVVENAHVYPKNSEDKPTATKTFDTAAGFVDPGEKGLAIGTKVPYIVTTTIPKNSTLATAFWSDEMTEGLDYNGDVVVNYNGQPLDNSHYTLEAGHNGFILKLNEKGLEAINGKDAEATITLKYTATLNALAVADVPEANDVTFHYGNNPGHGNTPKPNKPKNGELTITKTWADAKDAPIAGVEVTFDLVNAQTGEVVKVPGHETGIVLNQTNNWTFTATGLDNNTEYKFVERTIKGYSADYQTITETGKIAVKNWKDENPEPINPEEPRVKTYGKKFVKVDQKDERLKEAQFVVKNEQGKYLALKSAAQQAVNEKAAAEAKQALDAAIAAYTNAADKNAAQAVVDAAQKTYNDNYRAARFGYVEVERKEDALVLTSNTDGQFQISGLAAGSYTLEETKAPEGFAKLGDVKFEVGAGSWNQGDFNYLKDVQKNDATKVVNKKITIPQTGGIGTIIFAVAGAVIMGIAVYAYVKNNKDEDQLA

SEQ ID NO: 232 - protein, 401 aa, Streptococcus pneumoniae; identical to SEQ ID NO: 225

SEQ ID NO: 233 - protein, 304 aa, Streptococcus pneumoniae
MLIKMVKTKKQKRNNLLLGVVFFIGMAVMAYPLVSRLYYRVESNQQIADFDKEKATLDEADIDERMKLAQAFNDSLNNVVSGDPWSEEMKKKGRAEYARMLEIHERMGHVEIPVIDVDLPVYAGTAEEVLQQGAGQLEGTSLPIGGNSTHAVITAHTGLPTAKMFTDLTKLKVGDKFYVHNIKEVMAYQVDQVKVIEPTNFDDLLIVPGHDYVTLLTCTPYMINTHRLLVRGHRIPYVAEVEEEFIAANKLSHLYRYLFYVAVGLIVILLWIIRRLRKKKKQPEKALKALKAARKEVKVEDGQQ

SEQ ID NO: 234 - protein, 297 aa, Streptococcus pneumoniae
MDNSRRSRKKGTKKKKHPLILLLIFLVGFAVAIYPLVSRYYYRIESNEVIKEFDETVSQMDKAELEERWRLAQAFNATLKPSEILDPFTEQEKKKGVSEYANMLKVHERIGYVEIPAIDQEIPMYVGTSEEILQKGAGLLEGASLPVGGENTHTVVTAHRGLPTAELFSQLDKMKKGDVFYLHVLDQVLAYQVDQILTVEPNDFEPVLIQHGKDYATLLTCTPYMINSHRLLVRGKRIPYTAPIAERNRAVRERGQFWLWLLLAALVMILVLSYGVYRHRRIVKGLEKQLEEHHVKG

SEQ ID NO: 235 - protein, 283 aa, Streptococcus pneumoniae; identical to SEQ ID NO: 178

SEQ ID NO: 236 - protein, 509 aa, Streptococcus pneumoniae; identical to SEQ ID NO: 87

SEQ ID NO: 237 - protein, 883 aa, Streptococcus pneumoniae; identical to SEQ ID NO: 188

SEQ ID NO: 238 - protein, 644 aa, Streptococcus pneumoniae
MKSINKFLTMLAALLLTASSLFSAATVFAADNVSTAPDAVTKTLTIHKLLLSEDDLKTWDTNGPKGYDGTQSSLKDLTGVVAEEIPNVYFELQKYNLTDGKEKENLKDDSKWTTVHGGLTTKDGLKIETSTLKGVYRIREDRTKTTYVGPNGQVLTGSKAVPALVTLPLVNNNGTVIDAHVFPKNSYNKPVVDKRIADTLNYNDQNGLSIGTKIPYVVNTTIPSNATFATSFWSDEMTEGLTYNEDVTITLNNVAMDQADYEVTKGINGFNLKLTEAGLAKINGKDADQKIQITYSATLNSLAVADIPESNDITYHYGNHQDHGNTPKPTKPNNGQITVTKTWDSQPAPEGVKATVQLVNAKTGEKVGAPVELSENNWTYTWSGLDNSIEYKVEEEYNGYSAEYTVESKGKLGVKNWKDNNPAPINLEEPRVKTYGKKFVKVDQKDTRLENAQFVVKKADSNKYIAFKSTAQQAADEKAAATAKQKLDAAVAAYTNAADKQAAQALVDQAQQEYNVAYKEAKFGYVEVAGKDEAMVLTSNTDGQFQISGLAAGTYKLEEIKAPEGFAKIDDVEFVVGAGSWNQGEFNYLKDVQKNDATKVVNKKITIPQTGGIGTIIFAVAGAVIMGIAVYAYVKNNKDEDQLA

SEQ ID NO: 239 - protein, 401 aa, Streptococcus pneumoniae
MTMQKMQKMISRIFFVMALCFSLVWGAHAVQAQEDHTLVLQLENYQEVVSQLPSRDGHRLQVWKLDDSYSYDNRVQIVRDLHSWDENKLSSFKKTSFEMTFLENQIEVSHIPNGLYYVRSIIQTDAVSYPAEFLFEMTDQTVEPLVIVAKKADTVTTKVKLIKVDQDHNRLEGVGFKLVSVARDGSEKEVPLIGEYRYSSSGQVGRTLYTDKNGEIVVTNLPLGTYRFKEVEPLAGYAVTTMDTDVQLVDHQLVTITVVNQKLPRGNVDFMKVDGRTNTSLQGAMFKVMKEENGHYTPVLQNGKEVVVASGKDGRFRVEGLEYGTYYLWELQAPTGYVQLTSPVSFTIGKDTRKELVTVVKNNKRPRIDVPDTGEETLYILMLVAILLFGSGYYLTKKTNN

SEQ ID NO: 240 - protein, 302 aa, Streptococcus pneumoniae; identical to SEQ ID NO: 212

SEQ ID NO: 241 - protein, 297 aa, Streptococcus pneumoniae; identical to SEQ ID NO: 213

SEQ ID NO: 242 - protein, 283 aa, Streptococcus pneumoniae; identical to SEQ ID NO: 80

SEQ ID NO: 243 - protein, 511 aa, Streptococcus agalactiae
MPYVKKKKDSFLVETYLEQSIRDKSELVLLLFKSPTIIFSHVAKQTGLTAVQLKYYCKELDDFFGNNLDITIKKGKIICCFVKPVKEFYLHQLYDTSTILKLLVFFIKNGTSSQPLIKFSKKYFLSSSSAYRLRESLIKLLREFGLRVSKNTIVGEEYRIRYLIAMLYSKFGIVIYPLDHLDNQIIYRFLSQSATNLRTSPWLEEPFSFYNMLLALSWKRHQFAVSIPQTRIFRQLKKLFIYDCLTRSSRQVIENAFSLTFSQGDLDYLFLIYITTNNSFASLQWTPQHIETCCHIFEKNDTFRLLLEPILKRLPQLNHSKQDLIKALMYFSKSFLFNLQHFVIEIPSFSLPTYTGNSNLYKALKNIVNQWLAQLPGKRHLNEKHLQLFCSHIEQILKNKQPALTVVLISSNFINAKLLTDTIPRYFSDKGIHFYSFYLLRDDIYQIPSLKPDLVITHSRLIPFVKNDLVKGVTVAEFSFDNPDYSIASIQNLIYQLKDKKYQDFLNEQLQ

SEQ ID NO: 244 - protein, 744 aa, Streptococcus agalactiae
MQKRDKTNYGSANNKRRQTTIGLLKVFLTFVALIGIVGFSIRAFGAEEQSVPNRQSSIQDYPWYGYDSYPKGYPDYSPLKTYHNLKVNLEGSKDYQAYCFNLTKHFPSKSDSVRSQWYKKLEGTNENFIKLADKPRIEDGQLQQNILRILYNGYPNNRNGIMKGIDPLNAILVTQNAIWYYTDSAQINPDESFKTEARSNGINDQQLGLMRKALKELIDPNLGSKYSNKTPSGYRLNVFESHDKTFQNLLSAEYVPDTPPKPGEEPPAKTEKTSVIIRKYAEGDYSKLLEGATLKLSQIEGSGFQEKDFQSNSLGETVELPNGTYTLTETSSPDGYKIAEPIKFRVENKKVFIVQKDGSQVENPNKEVAEPYSVEAYNDFMDEEVLSGFTPYGKFYYAKNKDKSSQVVYCFNADLHSPPDSYDSGETINPDTSTMKEVKYTHTAGSDLFKYALRPRDTNPEDFLKHIKKVIEKGYKKKGDSYNGLTETQFRAATQLAIYYFTDSADLKTLKTYNNGKGYHGFESMDEKTLAVTKELITYAQNGSAPQLTNLDFFVPNNSKYQSLIGTEYHPDDLVDVIRMEDKKQEVIPVTHSLTVKKTVVGELGDKTKGFQFELELKDKTGQPIVNTLKTNNQDLVAKDGKYSFNLKHGDTIRIEGLPTGYSYTLKETEAKDYIVTVDNKVSQEAQSVGKDITEDKKVTFENRKDLVPPTGLTTDGAIYLWLLLLVPLGLLVWLFGRKGLKND

SEQ ID NO: 245 - protein, 173 aa, Streptococcus agalactiae
MTNYLNRLNENSLFKAFIRLVLKISIIGFLGYILFQYVFGVMIINTNDMSPALSAGDGVLYYRLADRSHINDVVVYEVDNTLKVGRIAAQAGDEVNFTQEGGLLINGHPPEKEVPYLTYPHSSGPNFPYKVPTGTYFILNDYREERLDSRYYGALPINQIKGKISTLLRVRGI

SEQ ID NO: 246 - protein, 344 aa, Streptococcus agalactiae
MKKNKLLLATAILATALGMASMSQNIKAETAGVIDGSTLVVKKTFPSYTDDNVLMPKADYSFKVEADDNAKGKTKDGLDIKPGVIDGLENTKTIRYSNSDKITAKEKSVNFEFANVKFPGVGVYRYTVAEVNGNKAGITYDSQQWTVDVYVVNKEGGGFEVKYIVSTEVGQSEKKPVLFKNSFDTTSLKIEKQVTGNTGEHQRLFSFTLLLTPNECFEKGQVVNILQGGETKKVVIGEEYSFTLKDKESVTLSQLPVGIEYKLTEEDVTKDGYKTSATLKDGEQSSTYELGKDHKTDKSADEIVVTNKRDTQVPTGVVGTLAPFAVLSIVAIGGVIYITKRKKA

SEQ ID NO: 247 - protein, 241 aa, Streptococcus agalactiae
MMMTIVQVINKAIDTLILIFCLVVLFLAGFGLWDSYHLYQQADASNFKKFKTAQQQPKFEDLLALNEDVIGWLNIPGTHIDYPLVQGKTNLEYINKAVDGSVAMSGSLFLDTRNHNDFTDDYSLIYGHHMAGNAMFGEIPKFLKKNFFNKHNKAIIETKERKKLTVTIFACLKTDAFDQLVFNPNAITNQDQQRQLVDYISKRSKQFKPVKLKHHTKFVAFSTCENFSTDNRVIVVGTIQE

SEQ ID NO: 248 - protein, 189 aa, Streptococcus agalactiae
MLFSVVMMLTMLAFNQTVLAKDSTVQTSISVENVLERAGDSTPFSIALESIDAMKTIEEITIAGSGKASFSPLTFTTVGQYTYRVYQKPSQNKDYQADTTVFDVLVYVTYDEDGTLVAKVISRRAGDEEKSAITFKPKRLVKPIPPRQPDIPKTPLPLAGEVKSLLGILSIVLLGLLVLLYVKKLKSRL

SEQ ID NO: 249 - protein, 401 aa, Streptococcus agalactiae; identical to SEQ ID NO: 119

SEQ ID NO: 250 - protein, 1160 aa, Streptococcus agalactiae
MTQKNSYKLSFLLSLTGFILGLLLVFIGLSGVSVGHAETRNGANKQGYFEIKKVDQNNKPLSGATFSLTPKDGKGKPVQTFTSSEEGIIDAQNLQPGTYTLKEETAPDGYDKTSRTWTVTVYENGYTKLVENPYNGEIISKAGSKDVSSSLQLENPKMSVVSKYGEQEKTSNSADFYRNHAAYFKMSFELKQKDKSETINPGDTFVLQLDRRLNPKGISQDIPKIIYDSENSPLAIGKYDAKTHQLTYTFTNYIAGLDKVQLSAELSLFLENKEVLENTNISDFKSTIGGQEITYKGTVNVLYGNESTKESNYITNGLSNVGGSIESYNTETGEFVWYVYVNPNRTNIPYAVLNLWGFAKRTAQGENDNSSVSSAQLTGYDIYEVPHNYRLPTSYGVDISRLNLRKDLEAKLPQGSTQGANKRLRIDFGENLQGKAFVVKVTGKADQSGKELIVQSHLSSFNNWGSYKTLRPNSHVSFTNEIALSPSKGSGSGTSEFTKPAITVANLKRVAQLRFKKVSTDNVPLPEAAFELRSSNGNSQKLEASSNTQGEIHFKDLTSGTYDLYETKAPKGYQQVTEKLATVTVDTTKPAEQMVKWEKPHSFVKVEANKEVTIVNHKETLTFSGKKIWENDRPDQRPAKIQVQLLQNGQKMPNQIQEVTKDNDWSYHFKDLPKYDAKNQEYKYSVEEVKVPDGYKVSYLGNDIFNTRETEFVFEQNNFNLEFGNAEIKGQSGSKIIDEDTLTSFKGKKIWKNDTAENRPQAIQVQLYADGVAVEGQTKFISGSGNEWSFEFKNLKKYNGTGNDIIYSVKEVTVPTGYDVTYSANDIINTKREVITQQGPNLEIEETLPLESGASGGTTTVEDSRSVDTLSGLSSEQGQSGDMTIEEDSATHIKFSKRDIDGKELAGATMELRDSSGKTISTWISDGQVKDFYLMPGKYTFVETAAPDGYEIATAITFTVNEQGQVTVNGKATKGDAHIVMVDAYKPTKGSGQVIDIEEKLPDEQGHSGSTTEIEDSKPSDVIIGGQGEVVDTTEDTQSGMTGHSGSTTEIEDSKSSDVIIGGQGQVVETTEDTQTGMHGDSGCKTEVEDTKLVQFFHFDNKEPESNSEIPKKDKPKSNTSLPATGEKQHNKFFWMVTSCSLISSVFVISLKSKKRLLSC

SEQ ID NO: 251 - DNA, 1650 bp, Streptococcus agalactiae
atgagagagaaaatattaatagcagcaaaaaaactaatgctagcttgtttagctatcttagctgtagtagggcttggaatgacaagagtatcagctttatcaaaagatgataaggcggagttgaagataacaaatatcgaaggtaaaccgaccgtgacactgtataaaattggtgatggaaaatacagtgagcgaggggattcttttattggatttgagttaaagcaaggtgtggagctaaataaggcaaaacctacatctcaagaaataaataaaatcgctaatggtattaataaaggtagtgttaaggctgaagtagttaatataaaagaacatgctagtacaacttatagttatacaacaactggtgcaggtatttacttggctatattgactggagctactgatggacgtgcctataatcctatcttactgacagcttcttacaatgaggaaaatccacttaagggagggcagattgacgcaactagtcattatctttttggagaagaagcagttgctaaatctagccaaccaacaattagcaagtcaattacaaaatccacaaaagatggtgataaagatacagcatctgtaggtgaaaaagttgattacaaattaactgttcagttaccaagttattcgaaagatgctatcaataaaacggtgtttatcactgacaaattgtctcagggacttactttccttccaaaaagtttaaagattatctggaatggtcaaacgttaacaaaggtgaatgaagaatttaaagctggagataaggtaattgctcaacttaaggttgaaaataatggatttaatctgaactttaattatgataaccttgataatcatgccccagaagttaactatagtgctctactaaatgaaaacgcagttgttggtaaaggtggtaatgacaataatgtagactattactattcaaataatccgaataaaggagagacccataaaacaactgagaagcctaaagagggtgaaggtactggtatcactaaaaagacggataaaaaaaccgtctacacctatcgtgtagcctttaagaaaacaggcaaagatcatgccccactagctggtgctgttttcggtatctattcagataaggaagcgaaacaattagtcgatattgttgtgacaaatgcacagggttatgcagcatcaagcgaagttgggaaagggacttattacattaaagaaattaaatcccctaagggttactctttaaatacaaatatttatgaagtggaaacttcatgggaaaaagctacaacgacttctacaactaatcgtttagagacaatttatacaacagatgataatcaaaagtctccaggaactaatacagttggttggttggaagatggtgtcttttacaaagaaaatccaggtggtgatgctaaacttgcctatatcaaacaatcaacagaggagacttctacaactatagaagtcaaagaaaatcaagctgaaggttcaggtacggtattattagaaactgaaattcctaacaccaaattaggtgaattaccttcgacaggtagcattggtacttacctctttaaagctattggttcggctgctatgatcggtgcaattggtatttatattgttaaacgtcgtaaagcttaa

SEQ ID NO: 252 - protein, 549 aa, Streptococcus agalactiae
MREKILIAAKKLMLACLAILAVVGLGMTRVSALSKDDKAELKITNIEGKPTVTLYKIGDGKYSERGDSFIGFELKQGVELNKAKPTSQEINKIANGINKGSVKAEVVNIKEHASTTYSYTTTGAGIYLAILTGATDGRAYNPILLTASYNEENPLKGGQIDATSHYLFGEEAVAKSSQPTISKSITKSTKDGDKDTASVGEKVDYKLTVQLPSYSKDAINKTVFITDKLSQGLTFLPKSLKIIWNGQTLTKVNEEFKAGDKVIAQLKVENNGFNLNFNYDNLDNHAPEVNYSALLNENAVVGKGGNDNNVDYYYSNNPNKGETHKTTEKPKEGEGTGITKKTDKKTVYTYRVAFKKTGKDHAPLAGAVFGIYSDKEAKQLVDIVVTNAQGYAASSEVGKGTYYIKEIKSPKGYSLNTNIYEVETSWEKATTTSTTNRLETIYTTDDNQKSPGTNTVGWLEDGVFYKENPGGDAKLAYIKQSTEETSTTIEVKENQAEGSGTVLLETEIPNTKLGELPSTGSIGTYLFKAIGSAAMIGAIGIYIVKRRKA

SEQ ID NO: 253 - DNA, 1059 bp, Streptococcus agalactiae
ttggagagagaaaaaatgaaaaaaaacaaattattacttgctactgcaatcttagcaactgctttaggaacagcttctttaaatcaaaacgtaaaagctgagacggcaggggttgtaacaggaaaatcactacaagttacaaagacaatgacttatgatgatgaagaggtgttaatgcccgaaaccgcctttacttttactatagagcctgatatgactgcaagtggaaaagaaggcagcctagatattaaaaatggaattgtagaaggcttagacaaacaagtaacagtaaaatataagaatacagataaaacatctcaaaaaactaaaatagcacaatttgatttttctaaggttaaatttccagctataggtgtttaccgctatatggtttcagagaaaaacgataaaaaagacggaattacgtacgatgataaaaagtggactgtagatgtttatgttgggaataaggccaataacgaagaaggtttcgaagttctatatattgtatcaaaagaaggtacttctagtactaaaaaaccaattgaatttacaaactctattaaaactacttccttaaaaattgaaaaacaaataactggcaatgcaggagatcgtaaaaaatcattcaacttcacattaacattacaaccaagtgaatattataaaactggatcagttgtgaaaatcgaacaggatggaagtaaaaaagatgtgacgataggaacgccttacaaatttactttgggacacggtaagagtgtcatgttatcgaaattaccaattggtatcaattactatcttagtgaagacgaagcgaataaagacggctacactacaacggcaacattaaaagaacaaggcaaagaaaagagttccgatttcactttgagtactcaaaaccagaaaacagacgaatctgctgacgaaatcgttgtcacaaataagcgtgacactcaagttccaactggtgttgtagggacccttgctccatttgcagttcttagcattgtggctattggtggagttatctatattacaaaacgtaaaaaagcttaa

SEQ ID NO: 254 - protein, 352 aa, Streptococcus agalactiae; identical to SEQ ID NO: 95

SEQ ID NO: 255 - DNA, 1029 bp, Streptococcus agalactiae
  misc_feature (918)..(918): n is a, c, g, or t
  misc_feature (921)..(921): n is a, c, g, or t
  misc_feature (929)..(929): n is a, c, g, or t
  misc_feature (939)..(939): n is a, c, g, or t
  misc_feature (945)..(945): n is a, c, g, or t
  misc_feature (957)..(957): n is a, c, g, or t
  misc_feature (967)..(967): n is a, c, g, or t
  misc_feature (977)..(977): n is a, c, g, or t
  misc_feature (983)..(983): n is a, c, g, or t
  misc_feature (989)..(989): n is a, c, g, or t
  misc_feature (996)..(996): n is a, c, g, or t
  misc_feature (999)..(999): n is a, c, g, or t
  misc_feature (1002)..(1002): n is a, c, g, or t
  misc_feature (1006)..(1006): n is a, c, g, or t
  misc_feature (1017)..(1017): n is a, c, g, or t
  misc_feature (1025)..(1025): n is a, c, g, or t
atgaaaaaaaataaattattacttgctactgcaatcttagcaactgctttaggaacagcttctttaaatcaaaacgtaaaagctgagacggcaggggttgttagcagtggtcaattaacaataaaaaaatcaattacaaattttaatgatgatacacttttgatgcctaagacagactatacttttagcgttaatccggatagtgcggctacaggtactgaaagtaatttaccaattaaaccaggtattgctgttaacaatcaagatattaaggtttcttattctaatactgataagacatcaggtaaagaaaaacaagttgttgttgactttatgaaagttacttttcctagcgttggtatttaccgttatgttgttaccgagaataaagggacagcagaaggagttacatatgatgatacaaaatggttagttgacgtctatgttggtaataatgaaaagggaggtcttgaaccaaagtatattgtatctaaaaaaggagattctgctactaaagaaccaatccagtttaataattcattcgaaacaacgtcattaaaaattgaaaagaaagttactggtaatacaggagatcataaaaaagcatttaactttacattaacattgcaaccaaatgaatactatgaggcaagttcggttgtgaaaattgaagagaacggacaaacgaaagatgtgaaaattggggaggcatataagtttactttgaacgatagtcagagtgtgatattgtctaaattaccagttggtattaattataaagttgaagaagcagaagctaatcaaggtggatatactacaacagcaactttaaaagatggagaaaagttatctacttataacttaggtcaggaacataaaacagacaagactgctgatgaaatcgttgtcacaaataancgngacactcnagttccaacnggtgtngtaggcaccccncctccattcncagttcttancattgnggctantggtggngtnatntatnttacaaaacgnaaaaaagnataa

SEQ ID NO: 256 - protein, 342 aa, Streptococcus agalactiae
  misc_feature (1)..(342): X = any amino acid residue
MKKNKLLLATAILATALGTASLNQNVKAETAGVVSSGQLTIKKSITNFNDDTLLMPKTDYTFSVNPDSAATGTESNLPIKPGIAVNNQDIKVSYSNTDKTSGKEKQVVVDFMKVTFPSVGIYRYVVTENKGTAEGVTYDDTKWLVDVYVGNNEKGGLEPKYIVSKKGDSATKEPIQFNNSFETTSLKIEKKVTGNTGDHKKAFNFTLTLQPNEYYEASSVVKIEENGQTKDVKIGEAYKFTLNDSQSVILSKLPVGINYKVEEAEANQGGYTTTATLKDGEKLSTYNLGQEHKTDKTADEIVVTNXRDTXVPTGVVGTPPPFXVLXIXAXGGVXYXTKRKKX

SEQ ID NO: 257 - DNA, 803 bp, Streptococcus agalactiae
agcagtggtcaattaacaataaaaaaatcaattacaaattttaatgatgatacacttttgatgcctaagacagactatacttttagcgttaatccggatagtgcggctacaggtactgaaagtaatttaccaattaaaccaggtattgctgttaacaatcaagatattaaggtttcttattctaatactgataagacatcaggtaaagaaaaacaagttgttgttgactttatgaaagttacttttcctagcgttggtatttaccgttatgttgttaccgagaataaagggacagcagaaggagttacatatgatgatacaaaatggttagttgacgtctatgttggtaataatgaaaagggaggtcttgaaccaaagtatattgtatctaaaaaaggagattctgctactaaagaaccaatccagtttaataattcattcgaaacaacgtcattaaaaattgaaaaggaagttactggtaatacaggagatcataaaaaagcatttaactttacattaacattgcaaccaaatgaatactatgaggcaagttcggttgtgaaaattgaagagaacggacaaacgaaagatgtgaaaattggggaggcatataagtttactttgaacgatagtcagagtgtgatattgtctaaattaccagttggtattaattataaagttgaagaagcagaagctaatcaaggtggatatactacaacagcaactttaaaagatggagaaaagttatctacttataacttaggtcaggaacataaaacagacaagactgctgatgaaatcgt

SEQ ID NO: 258 - protein, 268 aa, Streptococcus agalactiae
SSGQLTIKKSITNFNDDTLLMPKTDYTFSVNPDSAATGTESNLPIKPGIAVNNQDIKVSYSNTDKTSGKEKQVVVDFMKVTFPSVGIYRYVVTENKGTAEGVTYDDTKWLVDVYVGNNEKGGLEPKYIVSKKGDSATKEPIQFNNSFETTSLKIEKEVTGNTGDHKKAFNFTLTLQPNEYYEASSVVKIEENGQTKDVKIGEAYKFTLNDSQSVILSKLPVGINYKVEEAEANQGGYTTTATLKDGEKLSTYNLGQEHKTDKTADEIV

SEQ ID NO: 259 - DNA, 803 bp, Streptococcus agalactiae; identical to SEQ ID NO: 257

SEQ ID NO: 260 - protein, 268 aa, Streptococcus agalactiae; identical to SEQ ID NO: 258

SEQ ID NO: 261 - DNA, 843 bp, Streptococcus agalactiae
gagacggcaggggttgttagcagtggtcaattaacaataaaaaaatcaattacaaattttaatgatgatacacttttgatgcctaagacagactatacttttagcgttaatccggatagtgcggctacaggtactgaaagtaatttaccaattaaaccaggtattgctgttaacaatcaagatattaaggtttcttattctaatactgataagacatcaggtaaagaaaaacaagttgttgttgactttatgaaagttacttttcctagcgttggtatttaccgttatgttgttaccgagaataaagggacagcagaaggagttacatatgatgatacaaaatggttagttgacgtctatgttggtaataatgaaaagggaggtcttgaaccaaagtatattgtatctaaaaaaggagattctgctactaaagaaccaatccagtttaataattcattcgaaacaacgtcattaaaaattgaaaaggaagttactggtaatacaggagatcataaaaaagcatttaactttacattaacattgcaaccaaatgaatactatgaggcaagttcggttgtgaaaattgaagagaacggacaaacgaaagatgtgaaaattggggaggcatataagtttactttgaacgatagtcagagtgtgatattgtctaaattaccagttggtattaattataaagttgaagaagcagaagctaatcaaggtggatatactacaacagcaactttaaaagatggagaaaagttatctacttataacttaggtcaggaacataaaacagacaagactgctgatgaaatcgttgtcacaaataaccgtgacact

SEQ ID NO: 262 - protein, 281 aa, Streptococcus agalactiae
ETAGVVSSGQLTIKKSITNFNDDTLLMPKTDYTFSVNPDSAATGTESNLPIKPGIAVNNQDIKVSYSNTDKTSGKEKQVVVDFMKVTFPSVGIYRYVVTENKGTAEGVTYDDTKWLVDVYVGNNEKGGLEPKYIVSKKGDSATKEPIQFNNSFETTSLKIEKEVTGNTGDHKKAFNFTLTLQPNEYYEASSVVKIEENGQTKDVKIGEAYKFTLNDSQSVILSKLPVGINYKVEEAEANQGGYTTTATLKDGEKLSTYNLGQEHKTDKTADEIVVTNNRDT

SEQ ID NO: 263 - DNA, 900 bp, Streptococcus agalactiae
gagacggcaggagtgtccgaaaatgcaaaattaatagtaaaaaagacatttgactcttatacagacaatgaagttttaatgccaaaagctgattatacttttaaagtagaggcagatagtacagctagtggcaaaacgaaagacggtttagagattaagccaggtattgttaatggtttaacagaacagattatcagctatactaatactgataaaccagatagtaaagttaaaagtacagagtttgatttttcaaaagtagtattccctggtattggtgtttaccgctatactgtttcagaaaaacaaggtgatgttgaaggaattacctacgatactaagaagtggacagtagatgtttatgttggaaacaaagaaggtggtggttttgaacctaagtttattgtatctaaggaacaaggaacagacgtcaaaaaaccagttaattttaacaactcgtttgcaactacttcgttaaaagttaagaagaatgtatcggggaatactggagaattgcaaaaagaatttgactttacattgacgcttaatgaaagcacgaattttaaaaaagatcaaattgtttctttacaaaaaggaaacgagaaatttgaagttaagattggtactccctacaagtttaaactcaaaaatggggaatctattcaactagacaagttaccagttggtattacttataaagtcaatgaaatggaagctaataaagatgggtataaaacaacagcatccttgaaagagggagatggtcaatctaaaatgtatcaattggatatggaacaaaaaacagacgaatctgctgacgaaatcgttgtcacaaataagcgtgacactcaagttccaactggtgttgtaggcacccttgctccatttgcagttcttagc

SEQ ID NO: 264 - protein, 300 aa, Streptococcus agalactiae
ETAGVSENAKLIVKKTFDSYTDNEVLMPKADYTFKVEADSTASGKTKDGLEIKPGIVNGLTEQIISYTNTDKPDSKVKSTEFDFSKVVFPGIGVYRYTVSEKQGDVEGITYDTKKWTVDVYVGNKEGGGFEPKFIVSKEQGTDVKKPVNFNNSFATTSLKVKKNVSGNTGELQKEFDFTLTLNESTNFKKDQIVSLQKGNEKFEVKIGTPYKFKLKNGESIQLDKLPVGITYKVNEMEANKDGYKTTASLKEGDGQSKMYQLDMEQKTDESADEIVVTNKRDTQVPTGVVGTLAPFAVLS

SEQ ID NO: 265 - DNA, 864 bp, Streptococcus agalactiae
gagacggcaggggttgtaacaggaaaatcactacaagttacaaagacaatgacttatgatgatgaagaggtgttaatgcccgaaaccgcctttacttttactatagagcctgatatgactgcaagtggaaaagaaggcgacctagatattaaaaatggaattgtagaaggcttagacaaacaagtaacagtaaaatataagaatacagataaaacatctcaaaaaactaaaatagcacaatttgatttttctaaggttaaatttccagctataggtgtttaccgctatatggtttcagagaaaaacgataaaaaagacggaattaggtacgatgataaaaagtggactgtagatgtttatgttgggaataaggccaataacgaagaaggtttcgaagttctatatattgtatcaaaagaaggtacttctagtactaaaaaaccaattgaatttacaaactctattaaaactacttccttaaaaattgaaaaacaaataactggcaatgcaggagatcgtaaaaaatcattcaacttcacattaacattacaaccaagtgaatattataaaaccggatcagttgtgaaaatcgaacaggatggaagtaaaaaagatgtgacgataggaacgccttacaaatttactttgggacacggtaagagtgtcatgttatcgaaattaccaattggtatcaattactatcttagtgaagacgaagcgaataaagacggttacactacaacggcaacattaaaagaacaaggcaaagaaaagagttccgatttcactttgagtactcaaaaccagaaaacagacgaatctgctgacgaaatcgttgtcacaaataagcgtgacactctcgag

SEQ ID NO: 266 - protein, 288 aa, Streptococcus agalactiae
ETAGVVTGKSLQVTKTMTYDDEEVLMPETAFTFTIEPDMTASGKEGDLDIKNGIVEGLDKQVTVKYKNTDKTSQKTKIAQFDFSKVKFPAIGVYRYMVSEKNDKKDGIRYDDKKWTVDVYVGNKANNEEGFEVLYIVSKEGTSSTKKPIEFTNSIKTTSLKIEKQITGNAGDRKKSFNFTLTLQPSEYYKTGSVVKIEQDGSKKDVTIGTPYKFTLGHGKSVMLSKLPIGINYYLSEDEANKDGYTTTATLKEQGKEKSSDFTLSTQNQKTDESADEIVVTNKRDTLE

SEQ ID NO: 267 - DNA, 1446 bp, Streptococcus agalactiae
aaagatgatactgcacaactaaagataacaaatattgaaggtgggccaacagtaacactttataaaataggagaaggtgtttacaacactaatggtgattcttttattaactttaaatatgctgagggggtttctttaactgaaacaggacctacatcacaagaaattactactattgcaaatggtattaatacgggtaaaataaagccttttagtactgaaaacgttagtatttctaatggaacagcaacttataatgcgagaggtgcatctgtttatattgcattattaacaggtgcgacagatggccgtacctacaatcctattttattagctgcatcttataatggtgagggaaatttagttactaaaaatattgattccaaatctaattatttatatggacaaacaagtgttgcaaaatcatcattaccatctattacaaagaaagtaaccgggacaatagatgacgtgaataaaaagactacctcgttaggaagtgtattgtcttattcgctgacatttgaattaccaagttataccaaagaagcagtcaataaaacagtatatgtttctgataatatgtcggaaggtcttacttttaactttaatagtcttacagtagaatggaaaggtaagatggctaatattactgaagatggttcagtaatggtagaaaatacaaaaatcggaatagctaaggaggttaataacggttttaatttaagttttatttatgatagtttagaatctatatcaccaaatataagttataaagctgttgtaaacaataaagctattgttggtgaagagggtaatcctaataaagctgaattcttctattcaaataatccaacaaaaggtaatacatacgataatttagataagaagcctgataaagggaatggtattacatccaaagaagattctaaaattgtttatacttatcaaatagcgtttagaaaagttgatagtgttagtaagaccccacttattggtgcaatttttggagtttatgatactagtaataaattaattgatattgttacaaccaataaaaatggatatgctatttcaacacaagtatcttcaggaaaatataaaattaaggaattaaaagctcctaaaggttattcattgaatacagaaacttatgaaattacggcaaattgggtaactgctacagtcaagacaagtgctaattcaaaaagtactacttatacatctgataaaaataaggcgacagataattcagagcaagtaggatggttaaaaaatggtatattctattctatagatagtagacctacaggaaatgatgttaaagaggcttatattgaatctactaaggctttaactgatggaacaactttctcaaaatcgaatgaaggttcaggtacagtattattagaaactgacatccctaacaccaagctaggtgaactc

SEQ ID NO: 268 - protein, 482 aa, Streptococcus agalactiae
KDDTAQLKITNIEGGPTVTLYKIGEGVYNTNGDSFINFKYAEGVSLTETGPTSQEITTIANGINTGKIKPFSTENVSISNGTATYNARGASVYIALLTGATDGRTYNPILLAASYNGEGNLVTKNIDSKSNYLYGQTSVAKSSLPSITKKVTGTIDDVNKKTTSLGSVLSYSLTFELPSYTKEAVNKTVYVSDNMSEGLTFNFNSLTVEWKGKMANITEDGSVMVENTKIGIAKEVNNGFNLSFIYDSLESISPNISYKAVVNNKAIVGEEGNPNKAEFFYSNNPTKGNTYDNLDKKPDKGNGITSKEDSKIVYTYQIAFRKVDSVSKTPLIGAIFGVYDTSNKLIDIVTTNKNGYAISTQVSSGKYKIKELKAPKGYSLNTETYEITANWVTATVKTSANSKSTTYTSDKNKATDNSEQVGWLKNGIFYSIDSRPTGNDVKEAYIESTKALTDGTTFSKSNEGSGTVLLETDIPNTKLGEL

SEQ ID NO: 269 - DNA, 799 bp, Streptococcus agalactiae
gaatggaaaggtaagatggctaatattactgaagatggttcagtaatggtagaaaatacaaaaatcggaatagctaaggaggttaataacggttttaatttaagttttatttatgatagtttagaatctatatcaccaaatataagttataaagctgttgtaaacaataaagctattgttggtgaagagggtaatcctaataaagctgaattcttctattcaaataatccaacaaaaggtaatacatacgataatttagataagaagcctgataaagggaatggtattacatccaaagaagattctaaaattgtttatacttatcaaatagcgtttagaaaagttgatagtgttagtaagaccccacttattggtgcaatttttggagtttatgatactagtaataaattaattgatattgttacaaccaataaaaatggatatgctatttcaacacaagtatcttcaggaaaatataaaattaaggaattaaaagctcctaaaggttattcattgaatacagaaacttatgaaattacggcaaattgggtaactgctacagtcaagacaagtgctaattcaaaaagtactacttatacatctgataaaaataaggcgacagataattcagagcaagtaggatggttaaaaaatggtatattctattctatagatagtagacctacaggaaatgatgttaaagaggcttatattgaatctactaaggctttaactgatggaacaactttctcaaaatcgaatgaaggttcaggtacagtattattagaaactgacatcc

SEQ ID NO: 270 - protein, 266 aa, Streptococcus agalactiae
EWKGKMANITEDGSVMVENTKIGIAKEVNNGFNLSFIYDSLESISPNISYKAVVNNKAIVGEEGNPNKAEFFYSNNPTKGNTYDNLDKKPDKGNGITSKEDSKIVYTYQIAFRKVDSVSKTPLIGAIFGVYDTSNKLIDIVTTNKNGYAISTQVSSGKYKIKELKAPKGYSLNTETYEITANWVTATVKTSANSKSTTYTSDKNKATDNSEQVGWLKNGIFYSIDSRPTGNDVKEAYIESTKALTDGTTFSKSNEGSGTVLLETDI

SEQ ID NO: 271 - DNA, 643 bp, Streptococcus agalactiae
  misc_feature (165)..(165): n is a, c, g, or t
  misc_feature (250)..(250): n is a, c, g, or t
  misc_feature (360)..(360): n is a, c, g, or t
  misc_feature (369)..(369): n is a, c, g, or t
  misc_feature (498)..(498): n is a, c, g, or t
  misc_feature (549)..(549): n is a, c, g, or t
  misc_feature (559)..(559): n is a, c, g, or t
gtaacagtaaaatataagaatacagataaaacatctcaaaaaactaaaatagcacaatttgatttttctaaggttaaatttccagctataggtgtttaccgctatatggtttcagagaaaaacgataaaaaagacggaattacgtacgatgataaaaagtggacngtagatgtttatgttgggaataaggccaataacgaagaaggtttcgaagttctatatattgtatcaaaagaaggtacttctagtnctaaaaaaccaattgaatttacaaactctattaaaactacttccttaaaaattgaaaaacaaataactggcaatgcaggagatcgtaaaaaatcattcaacttcacattnacattacanccaagtgaatattataaaactggatcagttgtgaaaatcgaacaggatggaagtaaaaaagatgtgacgataggaacgccttacaaatttactttgggacacggtaagagtgtcatgttatcgaaattnccaattggtatcaattactatcttagtgaagacgaagcgaataaagacggntacactacancggcaacattaaaagaacaaggcaaagaaaagagttccgatttcactttgagtactcaaaaccagaaaacagacgaatctgctg

SEQ ID NO: 272 - protein, 214 aa, Streptococcus agalactiae
  misc_feature (84)..(84): Xaa can be any naturally occurring amino acid
  misc_feature (120)..(120): Xaa can be any naturally occurring amino acid
  misc_feature (123)..(123): Xaa can be any naturally occurring amino acid
  misc_feature (166)..(166): Xaa can be any naturally occurring amino acid
  misc_feature (187)..(187): Xaa can be any naturally occurring amino acid
VTVKYKNTDKTSQKTKIAQFDFSKVKFPAIGVYRYMVSEKNDKKDGITYDDKKWTVDVYVGNKANNEEGFEVLYIVSKEGTSSXKKPIEFTNSIKTTSLKIEKQITGNAGDRKKSFNFTXTLXPSEYYKTGSVVKIEQDGSKKDVTIGTPYKFTLGHGKSVMLSKXPIGINYYLSEDEANKDGYTTXATLKEQGKEKSSDFTLSTQNQKTDESA

SEQ ID NO: 273 - DNA, 380 bp, Streptococcus agalactiae
ttgatagaccgccttcattatcatttctagaatttttctttaggtttgtaaagactacaaaataaaatgatgaaaacaactatcttgtggatacactaaaaagacacgctaattagcaaactctctcttcatcatctctcaccattattatactactatttatatgacaaataaaggtgattttgttaaaatataactttgaaaatccacatatatttttaatcttccgtctgaaaaaataaataaaaatagtaaaaataaacacgaatttaaaataagcaaattttttaagaaaatctgtgctaaactttaatagttttgtgcttaataataatcagcacttacaaagaacaaagggaaaagcgaggagagaactttta

SEQ ID NO: 274 - DNA, 24 bp, Streptococcus agalactiae
actttctaatgagttgtttaggcg

SEQ ID NO: 275 - DNA, 24 bp, S. agalactiae
ctggtcgataactccttcaatctt

SEQ ID NO: 276 - DNA, 24 bp, S. agalactiae
gaatgcgatattcaggaccaacta

SEQ ID NO: 277 - DNA, 24 bp, S. agalactiae
tgtatacaagtgtgtcattgccag

SEQ ID NO: 278 - DNA, 23 bp, S. agalactiae
gcggtctttagtcttcaaaaaca

SEQ ID NO: 279 - DNA, 25 bp, S. agalactiae
ttgcttaagtaagagagaaaggagc

SEQ ID NO: 280 - DNA, 24 bp, S. agalactiae
ggcaatgttgactttatgaaggtg

SEQ ID NO: 281 - DNA, 24 bp, S. agalactiae
tgagattttctcgtttctcttagc

SEQ ID NO: 282 - DNA, 24 bp, S. agalactiae
ccgacgaactttgatgatttattg

SEQ ID NO: 283 - DNA, 23 bp, S. agalactiae
aatgactttgagcctgtcttgat

SEQ ID NO: 284 - DNA, 23 bp, S. agalactiae
gccatttggatcagctaaaagtt

SEQ ID NO: 285 - DNA, 24 bp, S. agalactiae
agcgacaagccactgtatcatatt

SEQ ID NO: 286 - DNA, 23 bp, S. agalactiae
gtacgacaaaagtgtggcttgtt

SEQ ID NO: 287 - DNA, 24 bp, S. agalactiae
atctcactgagttaatccgttcac

SEQ ID NO: 288 - DNA, 24 bp, S. agalactiae
catcttcacctgttctcacatttt

SEQ ID NO: 289 - DNA, 24 bp, S. agalactiae
caagagaaaaacacagagccataa

SEQ ID NO: 290 - DNA, 24 bp, S. agalactiae
caggagtatagtgtccgctttctt

SEQ ID NO: 291 - DNA, 25 bp, S. agalactiae
tatcagcatccctttatcttcaaac

SEQ ID NO: 292 - DNA, 25 bp, S. agalactiae
aatagacgatgggtattgatcatgt

SEQ ID NO: 293 - DNA, 24 bp, S. agalactiae
accaacagacgatgactgttaatc

SEQ ID NO: 294 - DNA, 24 bp, S. agalactiae
ttctacaatttcctggccattatc

SEQ ID NO: 295 - DNA, 24 bp, S. agalactiae
tttttcaacccactacagttgaca

SEQ ID NO: 296 - DNA, 13039 bp, S. agalactiae
taacacggattggaaataacatcaatcaaattgcgcgtgctatcaaccaaagccatctaatttctcaggctcagtatcactttcatcgagaagcacgttaagcccaacagcagggggggttgctctgattcggttaagtaataagcaaaatcctcaccaattttcccagtaataagaggcgttgttgaggtatagggattacctgtgccatagtcgatgatggtcacaaaatgaccattccccataaaagggccaaccaaaacttcacctgtggtttggatgtacccctccgttttttgatgtcaacaccagtattttggatgtaccccttaacatgccctttggtatctgcaacagagataatatgaccaaaggaagaatcaccgatgactttaaccgtaatcttgctatcgcctttttgattagccgctaatatttgattagcaatcagggtgcgaccaagagcaactgttgaagacgacaaggtatgatgtttttcctgagccaatttaacagtctcggtgctatcgaggacataagacctgaaggcaccagaggcagaaattgatttaataattttatccataacctatgttatagcacaaagagagagtttgtatggactggattagctgaaaattttagactaaaaagtagtgccagtggattttgaaaggtaacaaaagagtcttccgtttaaacgagaaggctgtttttagtcgtttcagatgaaggcaaaaggacgatgaaataattccgtaccttcatggattgctatgttactggcatgaggtctcacgatatttagtaagatattcgtttgaagatattcccacgtattttttaaaggttttaagaaaatgtgtggtgtcgtaaaaatgtaataatttcgctacttccccaatcggtacccctctttgcagtagtaattgtccctccttaatttttgcctttagaatataactttgcaaggaaatgtcagagtattttttaaaaactgagcgtaagtgggaatctgagatatataggtagttggcaatatcagatactttgagtttggagtagaggtggttgtccacataatggagaatactattgtacatttgctgcttgtcagagatgctcttattggttaaggattctgaaaaatcaataagagctgcacagcgaattcttgaaacatcaataagatcaggagcctcttcgtttaaagccatatagtgctttaccagcgcataacttttagccacatcagtattttcctcgaaacttaattctagtaattttgttaagtaaacaacagttaagttcttttcagctcttagggcagggattgaagatgaggtaacactggatgatgggaggcgattaatttcttgctttaacagttgagtgttacccagcttaacgagatcaataatgtgattgagatggtttaaaacagtgggtaactgaaaagagtttttcttagtatgttttaggtgaagaacaatatcaggatccgcaacaatctgttctgactcttctaataaatgattgatggcttgttggcaactagcctcaaactgtgtttggaaaaaggcatcgatagacacaagaagactacgtatactggtagtaggaaaacaagggacaagctttatataggataagatttcttttttactgattttgttaaaatattacgatgagaaaattgttctagaaagcgactggataactgttcttgcctattgatatcagggctatagggataaaatggtccaatagcaataagatattgacagacaggaaaaattaagaatgattcttcaaaaagaccctcataaacagtgatatcttggttataagggatagctaaatgttttaaaaactgatagtaaggcaacagatagtcttcgttaccatataactgaacgagttccttgtctcgtgacatgactgaaataggtagttgagatatggtatgcaatgtttgaacatgtttaaaatcgaatgtaaccatttgatagaccgccttcattatcatttctagaatttttctttaggtttgtaaagactacaaaataaaatgatgaaaacaactatcttgtggatacactaaaaagacacgctaattagcaaactctctcttcatcatctctcaccattattatactactatttatatgacaaataaaggtgattttgttaaaaatataactttgaaaatccacatatatttttaatcttccgtctgaaaaaataaataaaaatagtaaaaataaacacgaatttaaaataagcaaattttttaagaaaatctgtgctaaactttaatagttttgtgcttaataataatcagcacttacaaagaacaaagggaaaagcgaggagagaacttttaatgaaattatcgaagaagttattgttttcggctgctgttttaacaatggtggcggggtcaactgttgaaccagtagctcagtttgcgactggaatgagtattgtaagagctgcagaagtgtcacaagaacgcccagcgaaaacaacagtaaatatctataaattacaagctgatagttataaatcggaaattacttctaatggtggtatcgagaataaagacggcgaagtaatatctaactatgctaaacttggtgacaatgtaaaaggtttgcaaggtgtacagtttaaacgttataaagtcaagacggatatttctgttgatgaattgaaaaaattgacaacagttgaagcagcagatgcaaaagttggaacgattcttgaagaaggtgtcagtctacctcaaaaaactaatgctcaaggtttggtcgtcgatgctctggattcaaaaagtaatgtgagatacttgtatgtagaagatttaaagaattcaccttcaaacattaccaaagcttatgctgtaccgtttgtgttggaattaccagttgctaactctacaggtacaggtttcctttctgaaattaatatttaccctaaaaacgttgtaactgatgaaccaaaaacagataaagatgttaaaaaattaggtcaggacgatgcaggttatacgattggtgaagaattcaaatggttcttgaaatctacaatccctgccaatttaggtgactatgaaaaatttgaaattactgataaatttgcagatggcttgacttataaatctgttggaaaaatcaagattggttcgaaaacactgaatagagatgagcactacactattgatgaaccaacagttgataaccaaaatacattaaaaattacgtttaaaccagagaaatttaaagaaattgctgagctacttaaaggaatgacccttgttaaaaatcaagatgctcttgataaagctactgcaaatacagatgatgcggcatttttggaaattccagttgcatcaactattaatgaaaaagcagttttaggaaaagcaattgaaaatacttttgaacttcaatatgaccatactcctgataaagctgacaatccaaaaccatctaatcctccaagaaaaccagaagttcatactggtgggaaacgatttgtaaagaaagactcaacagaaacacaaacactaggtggtgctgagtttgatttgttggcttctgatgggacagcagtaaaatggacagatgctcttattaaagcgaatactaataaaaactatattgctggagaagctgttactgggcaaccaatcaaattgaaatcacatacagacggtacgtttgagattaaaggtttggcttatgcagttgatgcgaatgcagagggtacagcagtaacttacaaattaaaagaaacaaaagcaccagaaggttatgtaatccctgataaagaaatcgagtttacagtatcacaaacatcttataatacaaaaccaactgacatcacggttgatagtgctgatgcaacacctgatacaattaaaaacaacaaacgtccttcaatccctaatactggtggtattggtacggctatctttgtcgctatcggtgctgcggtgatggcttttgctgttaaggggatgaagcgtcgtacaaaagataactaaataaaaggctacttcttaagtaaccatgtttaagaaaagagaaatagccttatttctctttttgtcgtttttaaaataaaggaacatcatgaaacaaacattaaaacttatgttttcttttctgttgatgttagggactatgtttggaattagccaaactgttttagcgcaagaaactcatcagttgacgattgttcatcttgaagcaagggatattgatcgtccaaatccacagttggagattgcccctaaagaagggactccaattgaaggagtactctatcagttgtaccaattaaaatcaactgaagatggcgatttgttggcacattggaattccctaactatcacagaattgaaaaaacaggcgcagcaggtttttgaagccactactaatcaacaaggaaaggctacatttaaccaactaccagatggaatttattatggtctggcggttaaagccggtgaaaaaaatcgtaatgtctcagctttcttggttgacttgtctgaggataaagtgatttatcctaaaatcatctggtccacaggtgagttggacttgcttaaagttggtgtggatggtgataccaaaaaaccactagcaggcgttgtctttgaactttatgaaaagaatggtaggactcctattcgtgtgaaaaatggggtgcattctcaagatattgacgctgcaaaacatttagaaacagattcatcagggcatatcagaatttccgggctcatccatggggactatgtcttaaaagaaatcgagacacagtcaggatatcagatcggacaggcagagactgctgtgactattgaaaaatcaaaaacagtaacagtaacgattgaaaataaaaaagttccgacacctaaagtgccatctcgaggaggtcttattcccaaaacaggtgagcaacaggcaatggcacttgtaattattggtggtattttaattgctttagccttacgattactatcaaaacatcggaaacatcaaaataaggattagcatgggacaaaaatcaaaaatatctctagctacgaatattcgtatatggatttttcgtttaattttcttagcgggtttccttgttttggcatttcccatcgttagtcaggtcatgtactttcaagcctctcacgccaatattaatgcttttaaagaagctgttaccaagattgaccgggtggagattaatcggcgtttagaacttgcttatgcttataacgccagtatagcaggtgccaaaactaatggcgaatatccagcgcttaaagacccctactctgctgaacaaaagcaggcaggggtcgttgagtacgcccgcatgcttgaagtcaaagaacaaataggtcatgtgattattccaagaattaatcaggatatccctatttacgctggctctgctgaagaaaatcttcagaggggcgttggacatttagaggggaccagtcttccagtcggtggtgagtcaactcatgccgttctaactgcccatcgagggctaccaacggccaagctatttaccaatttagacaaggtaacagtaggtgaccgtttttacattgaacacatcggcggaaagattgcttatcaggtagaccaaatcaaagttatcgcccctgatcagttagaggatttgtacgtgattcaaggagaagatcacgtcaccctattaacttgcacaccttatatgataaatagtcatcgcctcctcgttcgaggcaagcgaattccttatgtggaaaaaacagtgcagaaagattcaaagaccttcaggcaacaacaatacctaacctatgctatgtgggtagtcgttggacttatcttgctgtcgcttctcatttggtttaaaaagacgaaacagaaaaagcggagaaagaatgaaaaagcggctagtcaaaatagtcacaataattcgaaataataaaatcagaaccctcatttttgtgatgggaagtctgattctcttatttccgattgtgagccaggtaagttactaccttgcttcgcatcaaaatattaatcaatttaagcgggaagtcgctaagattgatactaatacggttgaacgacgcatcgctttagctaatgcttacaatgagacgttatcaaggaatcccttgcttatagacccttttaccagtaagcaaaaagaaggtttgagagagtatgctcgtatgcttgaagttcatgagcaaataggtcatgtggcaatcccaagtattggggttgatattccaatttatgctggaacatccgaaactgtgcttcagaaaggtagtgggcatttggagggaaccagtcttccagtgggaggtttgtcaacccattcagtactaactgcccaccgtggcttgccaacagctaggctatttaccgacttaaataaagttaaaaaaggccagattttctatgtgacgaacatcaaggaaacacttgcctacaaagtcgtgtctatcaaagttgtggatccaacagctttaagtgaggttaagattgtcaatggtaaggattatataaccttgctgacttgcacaccttacatgatcaatagtcatcgtctcttggtaaaaggagagcgtattccttatgattctaccgaggcggaaaagcacaaagaacaaaccgtacaagattatcgtttgtcactagtgttgaagatactactagtattattaattggactcttcatcgtgataatgatgagaagatggatgcaacatcgtcaataacgatgttgtgaatggcttacttacttatcaaataggtgactaatgatgattgtgaataatggttatctagaagggagaaaaatgaaaaagagacaaaaaatatggagagggttatcagttactttactaatcctgtcccaaattccatttggtatattggtacaaggtgaaacccaagataccaatcaagcacttggaaaagtaattgttaaaaaaacgggagacaatgctacaccattaggcaaagcgacttttgtgttaaaaaatgacaatgataagtcagaaacaagtcacgaaacggtagagggttctggagaagcaacctttgaaaacataaaacctggagactacacattaagagaagaaacagcaccaattggttataaaaaaactgataaaacctggaaagttaaagttgcagataacggagcaacaataatcgagggtatggatgcagataaagcagagaaacgaaaagaagttttgaatgcccaatatccaaaatcagctatttatgaggatacaaaagaaaattacccattagttaatgtagagggttccaaagttggtgaacaatacaaagcattgaatccaataaatggaaaagatggtcgaagagagattgctgaaggttggttatcaaaaaaaattacaggggtcaatgatctcgataagaataaatataaaattgaattaactgttgagggtaaaaccactgttgaaacgaaagaacttaatcaaccactagatgtcgttgtgctattagataattcaaatagtatgaataatgaaagagccaataattctcaaagagcattaaaagctggggaagcagttgaaaagctgattgataaaattacatcaaataaagacaatagagtagctcttgtgacatatgcctcaaccatttttgatggtactgaagcgaccgtatcaaagggagttgccgatcaaaatggtaaagcgctgaatgatagtgtatcatgggattatcataaaactacttttacagcaactacacataattacagttatttaaatttaacaaatgatgctaacgaagttaatattctaaagtcaagaattccaaaggaagcggagcatataaatggggatcgcacgctctatcaatttggtgcgacatttactcaaaaagctctaatgaaagcaaatgaaattttagagacacaaagttctaatgctagaaaaaaacttatttttcacgtaactgatggtgtccctacgatgtcttatgccataaattttaatccttatatatcaacatcttaccaaaaccagtttaattcttttttaaataaaataccagatagaagtggtattctccaagaggattttataatcaatggtgatgattatcaaatagtaaaaggagatggagagagttttaaactgttttcggatagaaaagttcctgttactggaggaacgacacaagcagcttatcgagtaccgcaaaatcaactctctgtaatgagtaatgagggatatgcaattaatagtggatatatttatctctattggagagattacaactgggtctatccatttgatcctaagacaaagaaagtttctgcaacgaaacaaatcaaaactcatggtgagccaacaacattatactttaatggaaatataagacctaaaggttatgacatttttactgttgggattggtgtaaacggagatcctggtgcaactcctcttgaagctgagaaatttatgcaatcaatatcaagtaaaacagaaaattatactaatgttgatgatacaaataaaatttatgatgagctaaataaatactttaaaacaattgttgaggaaaaacattctattgttgatggaaatgtgactgatcctatgggagagatgattgaattccaattaaaaaatggtcaaagttttacacatgatgattacgttttggttggaaatgatggcagtcaattaaaaaatggtgtggctcttggtggaccaaacagtgatgggggaattttaaaagatgttacagtgacttatgataagacatctcaaaccatcaaaatcaatcatttgaacttaggaagtggacaaaaagtagttcttacctatgatgtacgtttaaaagataactatataagtaacaaattttacaatacaaataatcgtacaacgctaagtccgaagagtgaaaaagaaccaaatactattcgtgatttcccaattcccaaaattcgtgatgttcgtgagtttccggtactaaccatcagtaatcagaagaaaatgggtgaggttgaatttattaaagttaataaagacaaacattcagaatcgcttttgggagctaagtttcaacttcagatagaaaaagatttttctgggtataagcaatttgttccagagggaagtgatgttacaacaaagaatgatggtaaaatttattttaaagcacttcaagatggtaactataaattatatgaaatttcaagtccagatggctatatagaggttaaaacgaaacctgttgtgacatttacaattcaaaatggagaagttacgaacctgaaagcagatccaaatgctaataaaaatcaaatcgggtatcttgaaggaaatggtaaacatcttattaccaacactcccaaacgcccaccaggtgtttttcctaaaacagggggaattggtacaattgtctatatattagttggttctacttttatgatacttaccatttgttctttccgtcgtaaacaattgtaaggtgtcgttgaaattattaaataatagaaaatgactagttttggcctttccctattgtcagtcagattagttattatcaagcttctcatgccaatattaatgcctttaaaagaacagttacaaccattgaccgtacggagattcaacgacggttaggtctggctaaagcctacaatgctagtatttctggaacaagtagtcagtcgactcaatctgtgctgagagattcttattctgaggagcaaaaaaggcagggtggactgaatacgctaggatgttagaagtcagagagcaggttgaccatgtgatgattccaaaaatcaatcaggatttaccaatctacgctggttcagaagaggacaatctgcaacggggagttggtcatctagaagggataagtttgccgattggaggggcttctacacatgcggtcttgagcggtcaaagaggtatgccagctgctcggttgtttgcggatttggataagatgaaaaaaggtgattatttttatgttaccaatctgaaagaaaccttggcttatcaagtggatcgtatcatggtgattgaacctagccaattggatgccgtgagcattgaagaggataaagattatgttacccttctgacctgtacaccttatatgggctctttgtcaactgtaatgggtgacttatcattaacaacgagagagaatcagcttggttctctctctttttggatgttcaaagcgatgagaattttgcttttaaaatttttaaagttgcgaaagccaaaggcttgtcgcttgatgtctttgataagcttgttggtcgcttctaatttggcattggaaagggatagctgagggcgtttgtgatgtaagttttgtacttcatgaaggtcctaaagaccattttaaaagcagaattgccagttgttacgttatcatctatgaagctaaagaattcagttgttcgcttttcttagaaatgaaagagtatgagctgataaaggtcgttataatagcggagctcatctgagaaaacttttatacctcaaagtcagtctagctttgatatcatgaagccattaggagttattccttatcttttagtggcgcgcgatccatatagtgatagatcgagatatttagatccaaaagttctatcatcctcttttggcgccttttttccagcagataatattaaggtagcttggtctaacaactccagcactttatttacaccacctattaatgcaaactacaccactcagattcaagctattgggacaacgattaagtcacaaattccggaatcgattttgacggttacggataaaaagagcaggaagttcagcattaacaagattgacgaagctaaagaaggcttagtaggtgcgaccttcaccttgtctaaacgcacaacagtagcggcagatcatcaagtacaaggagatttcattcctgtcagcaaagagacgacagtcggtcggacaacccttacctttgacaaccttaaacctggattttatgaccttaaagaaacgaaagcgccgaatgcttacgtacttgatcctaagacttatgttgtggtcgttcaaaattcaggaaaaacgacaattgtggatgaagctaacttcaaagaggctgattacccaatggctgataataccagccatgtggagtgcgtagcgttgctacaacgaagcaaagggtaaaaatcctttattttaagcactttttcaagcattttgtctttattgaaaagagtgattttaacataaaaaaggtattaaaaaacatattgacgtgaccgtttgttttgaagtggcttgcgtagacaaaaaaatagatacgtcagataaatttctggcattacgagaacatttttagagtgttctctttttttagtttacggaggaaaaatatatatggaaaaacaggattcacgagttctcatccattgggaggggaattctggggacaagctcattgaacaccaaaccagcgcaacggggtggtactaccaagtcgatcgtagctttagtcaaccaaaaggggaaccgcccagaatgatccaaaggcactagaaagtgtccgtaatgattcgatttcgggcggtgatgatgtcatgggttatgcttatagcaaatgtacttggggagttgcggcacgaattaatcagtgggactgaaactcaaaggttgaaatggtgagaagattaccattaccagttcaatgggaaatggtcaggattgggttggaacagccgaaagactagatggtgaaactgatacagttccaaaagaaggtactattctctctttttaggaaagtagttatggttcgtatataggctacggaactatatctttcgtcacattacatctacagatagtaccatgaattttgcttatatgaccaagtaaagtgaggatatactaacaaatgaaatatttattatcgtatttgtccattttatcgaaaagtttgcatattatcattatgtttgataagatgcaaatataatgatagtaggagctaaatatggatatttaaaaaatcaagagtatcctaagtgctttccattttgaaattcaaatatagctaatagttctagaacttctaattgtttttcgtcgacgatatgaattttcaatcttaactgttaggattccacctccctttggttaaagaaaaaaggtcaggtcgtttagataactttgtcaaacaagctcaagctatctaaaaatagtttgaaatgggcattactctagtttttaataagctatctgatgagcagaaggagaagttaatgcatgttgggaagtcttattttgactatcaagaaaatgctcttatcccacaattaggttttctatattctaaattaactaaaaaaattgaacttgataatcggttgtctccgactgaacaaaagttattgattaccttattattacatactaaaggtttaatcattgatatgtaagaagtaagtcagctaaccgatctttctattctaaaacttatattgttgctttagaaattttaaagagcgtggatggcttcataataaacagaaatcttaccaatttgcgaagccaaaaaatatgatatttgaagagtccaaagatctaatagatagtccagttagagaagcgttgattataagtgataaggattttcaaaaattaaaacaagagctattattttaaccgacttattttaaagacttatcatatctaggcttgcttgatgattcggaaaaatacggagactatactatttcaaggaaaagatacaaaagtttcgaatcaagtcttcaactatacatccttcaaagtcatcggctagagatttggaattatgaaccaatccctttgattactagaaaaataaatagcttggagaggctaacgtgacactggttgatccaatctcgctttatttaacactaagaatgatgaagaccctcgtattgaagaagaagttgagcagctagaagataagat

SEQ ID NO: 297 - DNA, 13001 bp, S. agalactiae
taacacggattggaaataacatcaatcaaattgcgcgtgctatcaaccaaagccatctaatttctcaggctcagtatcactttcatcgagaagcacgttaagcccaacagcaggggggttgctctgattcggttaagtaataagcaaaatcctcaccaattttcccagtaataagaggcgttgttgaggtatagggattacctgtgccatagtcgatgatggtcacaaaatgaccattccccataaaagggccaaccaaaacttcacctgtgaccgttttttgatgtcaacaccagtattttggatgtaccccttaacatgccctttggtatctgcaacagagataatatgaccaaaggaagaatcaccgatgactttaaccgtaatcttgctatcgcctttttgattagccgctaatatttgattagcaatcagggtgcgaccaagagcaactgttgaagacgacaaggtatgatgtttttcctgagccaatttaacagtctcggtgctatcgaggacataagacctgaaggcaccagaggcagaaattgatttaataattttatccataacctatgttatagcacaaagagagagtttgtatggactggattagctgaaaattttagactaaaaagtagtgccagtggattttgaaaggtaacaaaagagtcttccgtttaaacgagaaggctctttttagtcgtttcagatgaaggcaaaaggacgatgaaataattccgtaccttcatggattgctatgttactggcatgaggtctcacgatatttagtaagatattcgtttgaagatattcccacgtattttttaaaggttttaagaaaatgtgtggtgtcgtaaaaatgtaataatttcgctacttccccaatcggtacccctctttgcagtagtaattgtccctccttaatttttgcctttagaatataactttgcaaggaaatgtcagagtattttttaaaaactgagcgtaagtgggaatctgagatatataggtagttggcaatatcagatactttgagtttggagtagaggtggttgtccacataatggagaatactattgtacatttgctgcttgtcagagatgctcttattggttaaggattctgaaaaatcaataagagctgcacagcgaattcttgaaacatcaataagatcaggagcctcttcgtttaaagccatatagtgctttaccagcgcataacttttagccacatcagtattttcctcgaaacttaattctagtaattttgttaagtaaacaacagttaagttcttttcagctcttagggcagggattgaagatgaggtaacactggatgatgggaggcgattaatttcttgctttaacagttgagtgttacccagcttaacgagatcaataatgtgattgagatggtttaaaacagtgggtaactgaaaagagtttttcttagtatgttttaggtgaagaacaatatcaggatccgcaacaatctgttctgactcttctaataaatgattgatgacttgttggcaactagcctcaaactgtgtttggaaaaaggcatcgatagacacaagaagactacgtatactggtagtaggaaaacaagggacaagctttatataggataagatttcttttttattacgatgagaaaattgttctagaaagcgactggataactgttcttgcctattgatatcagggctatagggataaaatggtccaatagcaataagatattgacagacaggaaaaattaagaatgattcttcaaaaagaccctcataaacagtgatatcttggttataagggatagctaaatgttttaaaaactgatagtaaggcaacagatagtcttcgttaccatataactgaacgagttccttgtctcgtgacatgactgaaataggtagttgagatatggtatgcaatgtttgaacatgtttaaaatcgaatgtaaccatttgatagaccgccttcattatcatttctagaatttttctttaggtttgtaaagactacaaaataaaatgatgaaaacaactatcttgtggatacactaaaaagacacgctaattagcaaactctctcttcatcatctctcaccattattatactactatttatatgacaaataaaggtgattttgttaaaatataactttgaaaatccacatatatttttaatcttccgtctgaaaaaataaataaaaatagtaaaaataaacacgaatttaaaataagcaaattttttaagaaaatctgtgctaaactttaatagttttgtgcttaataataatcagcacttacaaagaacaaagggaaaagcgaggagagaacttttaatgaaattatcgaagaagttattgttttcggctgctgttttaacaatggtggcggggtcaactgttgaaccagtagctcagtttgcgactggaatgagtattgtaagagctgcagaagtgtcacaagaacgcccagcgaaaacaacagtaaatatctataaattacaagctgatagttataaatcggaaattacttctaatggtggtatcgagaataaagacggcgaagtaatatctaactatgctaaacttggtgacaatgtaaaaggtttgcaaggtgtacagtttaaacgttataaagtcaagacggatatttctgttgatgaattgaaaaaattgacaacagttgaagcagcagatgcaaaagttggaacgattcttgaagaaggtgtcagtctacctcaaaaaactaatgctcaaggtttggtcgtcgatgctctggattcaaaaagtaatgtgagatacttgtatgtagaagatttaaagaattcaccttcaaacattaccaaagcttatgctgtaccgtttgtgttggaattaccagttgctaactctacaggtacaggtttcctttctgaaattaatatttaccctaaaaacgttgtaactgatgaaccaaaaacagataaagatgttaaaaaattaggtcaggacgatgcaggttatacgattggtgaagaattcaaatggttcttgaaatctacaatccctgccaatttaggtgactatgaaaaatttgaaattactgataaatttgcagatggcttgacttataaatctgttggaaaaatcaagattggttcgaaaacactgaatagagatgagcactacactattgatgaaccaacagttgataaccaaaatacattaaaaattacgtttaaaccagagaaatttaaagaaattgctgagctacttaaaggaatgacccttgttaaaaatcaagatgctcttgataaagctactgcaaatacagatgatgcggcatttttggaaattccagttgcatcaactattaatgaaaaagcagttttaggaaaagcaattgaaaatacttttgaacttcaatatgaccatactcctgataaagctgacaatccaaaaccatctaatcctccaagaaaaccagaagttcatactggtgggaaacgatttgtaaagaaagactcaacagaaacacaaacactaggtggtgctgagtttgatttgttggcttctgatgggacagcagtaaaatggacagatgctcttattaaagcgaatactaataaaaactatattgctggagaagctgttactgggcaaccaatcaaattgaaatcacatacagacggtacgtttgagattaaaggtttggcttatgcagttgatgcgaatgcagagggtacagcagtaacttacaaattaaaagaaacaaaagcaccagaaggttatgtaatccctgataaagaaatcgagtttacagtatcacaaacatcttataatacaaaaccaactgacatcacggttgatagtgctgatgcaacacctgatacaattaaaaacaacaaacgtccttcaatccctaatactggtggtattggtacggctatctttgtcgctatcggtgctgcggtgatggcttttgctgttaaggggatgaagcgtcgtacaaaagataactaaataaaaggctacttcttaagtaaccatgtttaagaaaagagaaatagccttatttctctttttgtcgtttttaaaataaaggaacatcatgaaacaaacattaaaacttatgttttcttttctgttgatgttagggactatgtttggaattagccaaactgttttagcgcaagaaactcatcagttgacgattgttcatcttgaagcaagggatattgatcgtccaaatccacagttggagattgcccctaaagaagggactccaattgaaggagtactctatcagttgtaccaattaaaatcaactgaagatggcgatttgttggcacattggaattccctaactatcacagaattgaaaaaacaggcgcagcaggtttttgaagccactactaatcaacaaggaaaggctacatttaaccaactaccagatggaatttattatggtctggcggttaaagccggtgaaaaaaatcgtaatgtctcagctttcttggttgacttgtctgaggataaagtgatttatcctaaaatcatctggtccacaggtgagttggacttgcttaaagttggtgtggatggtgataccaaaaaaccactagcaggcgttgtctttgaactttatgaaaagaatggtaggactcctattcgtgtgaaaaatggggtgcattctcaagatattgacgctgcaaaacatttagaaacagattcatcagggcatatcagaatttccgggctcatccatggggactatgtcttaaaagaaatcgagacacagtcaggatatcagatcggacaggcagagactgctgtgactattgaaaaatcaaaaacagtaacagtaacgattgaaaataaaaaagttccgacacctaaagtgccatctcgaggaggtcttattcccaaaacaggtgagcaacaggcaatggcacttgtaattattggtggtattttaattgctttagccttacgattactatcaaaacatcggaaacatcaaaataaggattagcatgggacaaaaatcaaaaatatctctagctacgaatattcgtatatggatttttcgtttaattttcttagcgggtttccttgttttggcatttcccatcgttagtcaggtcatgtactttcaagcctctcacgccaatattaatgcttttaaagaagctgttaccaagattgaccgggtggagattaatcggcgtttagaacttgcttatgcttataacgccagtatagcaggtgccaaaactaatggcgaatatccagcgcttaaagacccctactctgctgaacaaaagcaggcaggggtcgttgagtacgcccgcatgcttgaagtcaaagaacaaataggtcatgtgattattccaagaattaatcaggatatccctatttacgctggctctgctgaagaaaatcttcagaggggcgttggacatttagaggggaccagtcttccagtcggtggtgagtcaactcatgccgttctaactgcccatcgagggctaccaacggccaagctatttaccaatttagacaaggtaacagtaggtgaccgtttttacattgaacacatcggcggaaagattgcttatcaggtagaccaaatcaaagttatcgcccctgatcagttagaggatttgtacgtgattcaaggagaagatcacgtcaccctattaacttgcacaccttatatgataaatagtcatcgcctcctcgttcgaggcaagcgaattccttatgtggaaaaaacagtgcagaaagattcaaagaccttcaggcaacaacaatacctaacctatgctatgtgggtagtcgttggacttatcttgctgtcgcttctcatttggtttaaaaagacgaaacagaaaaagcggagaaagaatgaaaaagcggctagtcaaaatagtcacaataattcgaaataataaaatcagaaccctcatttttgtgatgggaagtctgattctcttatttccgattgtgagccaggtaagttactaccttgcttcgcatcaaaatattaatcaatttaagcgggaagtcgctaagattgatactaatacggttgaacgacgcatcgctttagctaatgcttacaatgagacgttatcaaggaatcccttgcttatagacccttttaccagtaagcaaaaagaaggtttgagagagtatgctcgtatgcttgaagttcatgagcaaataggtcatgtggcaatcccaagtattggggttgatattccaatttatgctggaacatccgaaactgtgcttcagaaaggtagtgggcatttggagggaaccagtcttccagtgggaggtttgtcaacccattcagtactaactgcccaccgtggcttgccaacagctaggctatttaccgacttaaataaagttaaaaaaggccagattttctatgtgacgaacatcaaggaaacacttgcctacaaagtcgtgtctatcaaagttgtggatccaacagctttaagtgaggttaagattgtcaatggtaaggattatataaccttgctgacttgcacaccttacatgatcaatagtcatcgtctcttggtaaaaggagagcgtattccttatgattctaccgaggcggaaaagcacaaagaacaaaccgtacaagattatcgtttgtcactagtgttgaagatactactagtattattaattggactcttcatcgtgataatgatgagaagatggatgcaacatcgtcaataacgatgttgtgaatggcttacttatcaaataggtgactaatgatgattgtgaataatggttatctagaagggagaaaaatgaaaaagagacaaaaaatatggagagggttatcagttactttactaatcctgtcccaaattccatttggtatattggtacaaggtgaaacccaagataccaatcaagcacttggaaaagtaattgttaaaaaaacgggagacaatgctacaccattaggcaaagcgacttttgtgttaaaaaatgacaatgataagtcagaaacaagtcacgaaacggtagagggttctggagaagcaacctttgaaaacataaaacctggagactacacattaagagaagaaacagcaccaattggttataaaaaaactgataaaacctggaaagttaaagttgcagataacggagcaacaataatcgagggtatggatgcagataaagcagagaaacgaaaagaagttttgaatgcccaatatccaaaatcagctatttatgaggatacaaaagaaaattacccattagttaatgtagagggttccaaagttggtgaacaatacaaagcattgaatccaataaatggaaaagatggtcgaagagagattgctgaaggttggttatcaaaaaaaattacaggggtcaatgatctcgataagaataaatataaaattgaattaactgttgagggtaaaaccactgttgaaacgaaagaacttaatcaaccactagatgtcgttgtgctattagataattcaaatagtatgaataatgaaagagccaataattctcaaagagcattaaaagctggggaagcagttgaaaagctgattgataaaattacatcaaataaagacaatagagtagctcttgtgacatatgcctcaaccatttttgatggtactgaagcgaccgtatcaaagggagttgccgatcaaaatggtaaagcgctgaatgatagtgtatcatgggattatcataaaactacttttacagcaactacacataattacagttatttaaatttaacaaatgatgctaacgaagttaatattctaaagtcaagaattccaaaggaagcggagcatataaatggggatcgcacgctctatcaatttggtgcgacatttactcaaaaagctctaatgaaagcaaatgaaattttagagacacaaagttctaatgctagaaaaaaacttatttttcacgtaactgatggtgtccctacgatgtcttatgccataaattttaatccttatatatcaacatcttaccaaaaccagtttaattcttttttaaataaaataccagatagaagtggtattctccaagaggattttataatcaatggtgatgattatcaaatagtaaaaggagatggagagagttttaaactgttttcggatagaaaagttcctgttactggaggaacgacacaagcagcttatcgagtaccgcaaaatcaactctctgtaatgagtaatgagggatatgcaattaatagtggatatatttatctctattggagagattacaactgggtctatccatttgatcctaagacaaagaaagtttctgcaacgaaacaaatcaaaactcatggtgagccaacaacattatactttaatggaaatataagacctaaaggttatgacatttttactgttgggattggtgtaaacggagatcctggtgcaactcctcttgaagctgagaaatttatgcaatcaatatcaagtaaaacagaaaattatactaatgttgatgatacaaataaaatttatgatgagctaaataaatactttaaaacaattgttgaggaaaaacattctattgttgatggaaatgtgactgatcctatgggagagatgattgaattccaattaaaaaatggtcaaagttttacacatgatgattacgttttggttggaaatgatggcagtcaattaaaaaatggtgtggctcttggtggaccaaacagtgatgggggaattttaaaagatgttacagtgacttatgataagacatctcaaaccatcaaaatcaatcatttgaacttaggaagtggacaaaaagtagttcttacctatgatgtacgtttaaaagataactatataagtaacaaattttacaatacaaataatcgtacaacgctaagtccgaagagtgaaaaagaaccaaatactattcgtgatttcccaattcccaaaattcgtgatgttcgtgagtttccggtactaaccatcagtaatcagaagaaaatgggtgaggttgaatttattaaagttaataaagacaaacattcagaatcgcttttgggagctaagtttcaacttcagatagaaaaagatttttctgggtataagcaatttgttccagagggaagtgatgttacaacaaagaatgatggtaaaatttattttaaagcacttcaagatggtaactataaattatatgaaatttcaagtccagatggctatatagaggttaaaacgaaacctgttgtgacatttacaattcaaaatggagaagttacgaacctgaaagcagatccaaatgctaataaaaatcaaatcgggtatcttgaaggaaatggtaaacatcttattaccaacactcccaaacgcccaccaggtgtttttcctaaaacagggggaattggtacaattgtctatatattagttggttctacttttatgatacttaccatttgttctttccgtcgtaaacaattgtaaggtgtcgttgaaattattaaataatagaaaatgactagttttggcctttccctattgtcagtcagattagttattatcaagcttctcatgccaatattaatgcctttaaaagaacagttacaaccattgaccgtacggagattcaacgacggttaggtctggctaaagcctacaatgctagtatttctggaacaagtagtcagtcgactcaatctgtgctgagagattcttattctgaggagcaaaaaaggcagggtggactgaatacgctaggatgttagaagtcagagagcaggttgaccatgtgatgattccaaaaatcaatcaggatttaccaatctacgctggttcagaagaggacaatctgcaacggggagttggtcatctagaagggataagtttgccgattggaggggcttctacacatgcggtcttgagcggtcaaagaggtatgccagctgctcggttgtttgcggatttggataagatgaaaaaaggtgattatttttatgttaccaatctgaaagaaaccttggcttatcaagtggatcgtatcatggtgattgaacctagccaattggatgccgtgagcattgaagaggataaagattatgttacccttctgacctgtacaccttatatgggctctttgtcaactgtaatgggtgacttatcattaacaacgagagagaatcagcttggttctctctctttttggatgttcaaagcgatgagaattttgcttttaaaatttttaaagttgcgaaagccaaaggcttgtcgcttgatgtctttgataagcttgttggtcgcttctaatttggcattggaaagggatagctgagggcgtttgtgatgtaagttttgtacttcatgaaggtcctaaagaccattttaaaagcagaattgccagttgttacgttatcatctatgaagctaaagaattcagttgttcgcttttcttagaaatgaaagagtatgagctgataaaggtcgttataatagcggagctcatctgagaaaacttttatacctcaaagtcagtctagctttgatatcatgaagccattaggagttattccttatcttttagtggcgcgcgatccatatagtgatagatcgagatatttagatccaaaagttctatcatcctcttttggcgccttttttccagcagataatattaaggtagcttggtctaacaactccagcactttatttacaccacctattaatgcaaactacaccactcagattcaagctattgggacaacgattaagtcacaaattccggaatcgattttgacggttacggataaaaagagcaggaagttcagcattaacaagattgacgaagctaaagaaggcttagtaggtgcgaccttcaccttgtctaaacgcacaacagtagcggcagatcatcaagtacaaggagatttcattcctgtcagcaaagagacgacagtcggtcggacaacccttacctttgacaaccttaaacctggattttatgaccttaaagaaacgaaagcgccgaatgcttacgtacttgatcctaagacttatgttgtggtcgttcaaaattcaggaaaaacgacaattgtggatgaagctaacttcaaagaggctgattacccaatggctgataataccagccatgtggagtgcgtagcgttgctacaacgaagcaaagggtaaaaatcctttattttaagcactttttcaagcattttgtctttattgaaaagagtgattttaacataaaaaaggtattaaaaaacatattgacgtgaccgtttgttttgaagtggcttgcgtagacaaaaaaatagatacgtcagataaatttctggcattacgagaacatttttagagtgttctctttttttagtttacggaggaaaaatatatatggaaaaacaggattcacgagttctcatccattgggaggggaattctggggacaagctcattgaacaccaaaccagcgcaacggggtggtactaccaagtcgatcgtagctttagtcaaccaaaaggggaaccgcccagaatgatccaaaggcactagaaagtgtccgtaatgattcgatttcgggcggtgatgatgtcatgggttatgcttatagcaaatgtacttggggagttgcggcacgaattaatcagtgggactgaaactcaaaggttgaaatggtgagaagattaccattaccagttcaatgggaaatggtcaggattgggttggaacagccgaaagactagatggtgaaactgatacagttccaaaagaaggtactattctctctttttaggaaagtagttatggttcgtatataggctacggaactatatctttcgtcacattacatctacagatagtaccatgaattttgcttatatgaccaagtaaagtgaggatatactaacaaatgaaatatttattatcgtatttgtccattttatcgaaaagtttgcatattatcattatgtttgataagatgcaaatataatgatagtaggagctaaatatggatatttaaaaaatcaagagtatcctaagtgctttccattttgaaattcaaatatagctaatagttctagaacttctaattgtttttcgtcgacgatatgaattttcaatcttaactgttaggattccacctccctttggttaaagaaaaaaggtcaggtcgtttagataactttgtcaaacaagctcaagctatctaaaaatagtttgaaatgggcattactctagtttttaataagctatctgatgagcagaaggagaagttaatgcatgttgggaagtcttattttgactatcaagaaaatgctcttatcccacaattaggttttctatattctaaattaactaaaaaaattgaacttgataatcggttgtctccgactgaaaaaaagttattgattaccttattattacatactaaaggtttaatcattgatatgtaagaagtaagtcagctaaccgatctttctattctaaaacttatattgttgctttagaaattttaaagagcgtggatggcttcataataaacagaaatcttaccaatttgcgaagccaaaaaatatgatatttgaagagtccaaagatctaatagatagtccagttagagaagcgttgattataagtgataaggattttcaaaaattaaaacaagagctattattttaaccgacttattttaaagacttatcatatctaggcttgcttgatgattcggaaaaatacggagactatactatttcaaggaaaagatacaaaagtttcgaatcaagtcttcaactatacatccttcaaagtcatcggctagagatttggaattatgaaccaatccctttgattactagaaaaataaatagcttggagaggctaacgtgacactggttgatccaatctcgctttatttaacactaagaatgatgaagaccctcgtattgaagaagaagttgagcagctagaagataagat

SEQ ID NO: 298 - DNA, 13002 bp, S. agalactiae
catcaagtgactcatgaacacgtgtcaatcttattgacctgcgttcaagaattgattgtggaagtcaatcaaacacagccactcagtcgtgagtttcgtgaaaagtatatgggttaggaggctgcaattgtttatcgttatcgtaccaatctcaaaaaagtctttctaacagattcagaattgaatcaattaaatgagcggattgctaagagcaattgtcaaaatttcgaccattccccataaaagggccaaccaaaacttcacctgtgaccgttttttgatgtcaacaccagtattttggatgtaccccttaacatgccctttggtatctgcaacagagataatatgaccaaaggaagaatcaccgatgactttaaccgtaatcttgctatcgcctttttgattagccgctaatatttgattagcaatcagggtgcgaccaagagcaactgttgaagacgacaaggtatgatgtttttcctgagccaatttaacagtctcggtgctatcgaggacataagacctgaaggcaccagaggcagaaattgatttaataattttatccataacctatgttatagcacaaagagagagtttgtatggactggattagctgaaaattttagactaaaaagtagtgccagtggattttgaaaggtaacaaaagagtcttccgtttaaacgagaaggctctttttagtcgtttcagatgaaggcaaaaggacgatgaaataattccgtaccttcatggattgctatgttactggcatgaggtctcacgatatttagtaagatattcgtttgaagatattcccacgtattttttaaaggttttaagaaaatgtgtggtgtcgtaaaaatgtaataatttcgctacttccccaatcggtacccctctttgcagtagtaattgtccctccttaatttttgcctttagaatataactttgcaaggaaatgtcagagtattttttaaaaactgagcgtaagtgggaatctgagatatataggtagttggcaatatcagatactttgagtttggagtagaggtggttgtccacataatggagaatactattgtacatttgctgcttgtcagagatgctcttattggttaaggattctgaaaaatcaataagagctgcacagcgaattcttgaaacatcaataagatcaggagcctcttcgtttaaagccatatagtgctttaccagcgcataacttttagccacatcagtattttcctcgaaacttaattctagtaattttgttaagtaaacaacagttaagttcttttcagctcttagggcagggattgaagatgaggtaacactggatgatgggaggcgattaatttcttgctttaacagttgagtgttacccagcttaacgagatcaataatgtgattgagatggtttaaaacagtgggtaactgaaaagagtttttcttagtatgttttaggtgaagaacaatatcaggatccgcaacaatctgttctgactcttctaataaatgattgatgacttgttggcaactagcctcaaactgtgtttggaaaaaggcatcgatagacacaagaagactacgtatactggtagtaggaaaacaagggacaagctttatataggataagatttcttttttactacgatgagaaaattgttctagaaagcgactggataactgttcttgcctattgatatcagggctatagggataaaatggtccaatagcaataagatattgacagacaggaaaaattaagaatgattcttcaaaaagaccctcataaacagtgatatcttggttataagggatagctaaatgttttaaaaactgatagtaaggcaacagatagtcttcgttaccatataactgaacgagttccttgtctcgtgacatgactgaaataggtagttgagatatggtatgcaatgtttgaacatgtttaaaatcgaatgtaaccatttgatagaccgccttcattatcatttctagaatttttctttaggtttgtaaagactacaaaataaaatgatgaaaacaactatcttgtggatacactaaaaagacacgctaattagcaaactctctcttcatcatctctcaccattattatactactatttatatgacaaataaaggtgattttgttaaaatataactttgaaaatccacatatatttttaatcttccgtctgaaaaaataaataaaaatagtaaaaataaacacgaatttaaaataagcaaattttttaagaaaatctgtgctaaactttaatagttttgtgcttaataataatcagcacttacaaagaacaaagggaaaagcgaggagagaacttttaatgaaattatcgaagaagttattgttttcggctgctgttttaacaatggtggcggggtcaactgttgaaccagtagctcagtttgcgactggaatgagtattgtaagagctgcagaagtgtcacaagaacgcccagcgaaaacaacagtaaatatctataaattacaagctgatagttataaatcggaaattacttctaatggtggtatcgagaataaagacggcgaagtaatatctaactatgctaaacttggtgacaatgtaaaaggtttgcaaggtgtacagtttaaacgttataaagtcaagacggatatttctgttgatgaattgaaaaaattgacaacagttgaagcagcagatgcaaaagttggaacgattcttgaagaaggtgtcagtctacctcaaaaaactaatgctcaaggtttggtcgtcgatgctctggattcaaaaagtaatgtgagatacttgtatgtagaagatttaaagaattcaccttcaaacattaccaaagcttatgctgtaccgtttgtgttggaattaccagttgctaactctacaggtacaggtttcctttctgaaattaatatttaccctaaaaacgttgtaactgatgaaccaaaaacagataaagatgttaaataattaggtcaggacgatgcaggttatacgattggtgaagaattcaaatggttcttgaaatctacaatccctgccaatttaggtgactatgaaaaatttgaaattactgataaatttgcagatggcttgacttataaatctgttggaaaaatcaagattggttcgaaaacactgaatagagatgagcactacactattgatgaaccaacagttgataaccaaaatacattaaaaattacgtttaaaccagagaaatttaaagaaattgctgagctacttaaaggaatgacccttgttaaaaatcaagatgctcttgataaagctactgcaaatacagatgatgcggcatttttggaaattccagttgcatcaactattaatgaaaaagcagttttaggaaaagcaattgaaaatacttttgaacttcaatatgaccatactcctgataaagctgacaatccaaaaccatctaatcctccaagaaaaccagaagttcatactggtgggaaacgatttgtaaagaaagactcaacagaaacacaaacactaggtggtgctgagtttgatttgttggcttctgatgggacagcagtaaaatggacagatgctcttattaaagcgaatactaataaaaactatattgctggagaagctgttactgggcaaccaatcaaattgaaatcacatacagacggtacgtttgagattaaaggtttggcttatgcagttgatgcgaatgcagagggtacagcagtaacttacaaattaaaagaaacaaaagcaccagaaggttatgtaatccctgataaagaaatcgagtttacagtatcacaaacatcttataatacaaaaccaactgacatcacggttgatagtgctgatgcaacacctgatacaattaaaaacaacaaacgtccttcaatccctaatactggtggtattggtacggctatctttgtcgctatcggtgctgcggtgatggcttttgctgttaaggggatgaagcgtcgtacaaaagataactaaataaaaggctacttcttaagtaaccatgtttaagaaaagagaaatagccttatttctctttttgtcgtttttaaaataaaggaacatcatgaaacaaacattaaaacttatgttttcttttctgttgatgttagggactatgtttggaattagccaaactgttttagcgcaagaaactcatcagttgacgattgttcatcttgaagcaagggatattgatcgtccaaatccacagttggagattgcccctaaagaagggactccaattgaaggagtactctatcagttgtaccaattaaaatcaactgaagatggcgatttgttggcacattggaattccctaactatcacagaattgaaaaaacaggcgcagcaggtttttgaagccactactaatcaacaaggaaaggctacatttaaccaactaccagatggaatttattatggtctggcggttaaagccggtgaaaaaaatcgtaatgtctcagctttcttggttgacttgtctgaggataaagtgatttatcctaaaatcatctggtccacaggtgagttggacttgcttaaagttggtgtggatggtgataccaaaaaaccactagcaggcgttgtctttgaactttatgaaaagaatggtaggactcctattcgtgtgaaaaatggggtgcattctcaagatattgacgctgcaaaacatttagaaacagattcatcagggcatatcagaatttccgggctcatccatggggactatgtcttaaaagaaatcgagacacagtcaggatatcagatcggacaggcagagactgctgtgactattgaaaaatcaaaaacagtaacagtaacgattgaaaataaaaaagttccgacacctaaagtgccatctcgaggaggtcttattcccaaaacaggtgagcaacaggcaatggcacttgtaattattggtggtattttaattgctttagccttacgattactatcaaaacatcggaaacatcaaaataaggattagcatgggacaaaaatcaaaaatatctctagctacgaatattcgtatatggatttttcgtttaattttcttagcgggtttccttgttttggcatttcccatcgttagtcaggtcatgtactttcaagcctctcacgccaatattaatgcttttaaagaagctgttaccaagattgaccgggtggagattaatcggcgtttagaacttgcttatgcttataacgccagtatagcaggtgccaaaactaatggcgaatatccagcgcttaaagacccctactctgctgaacaaaagcaggcaggggtcgttgagtacgcccgcatgcttgaagtcaaagaacaaataggtcatgtgattattccaagaattaatcaggatatccctatttacgctggctctgctgaagaaaatcttcagaggggcgttggacatttagaggggaccagtcttccagtcggtggtgagtcaactcatgccgttctaactgcccatcgagggctaccaacggccaagctatttaccaatttagacaaggtaacagtaggtgaccgtttttacattgaacacatcggcggaaagattgcttatcaggtagaccaaatcaaagttatcgcccctgatcagttagaggatttgtacgtgattcaaggagaagatcacgtcaccctattaacttgcacaccttatatgataaatagtcatcgcctcctcgttcgaggcaagcgaattccttatgtggaaaaaacagtgcagaaagattcaaagaccttcaggcaacaacaatacctaacctatgctatgtgggtagtcgttggacttatcttgctgtcgcttctcatttggtttaaaaagacgaaacagaaaaagcggagaaagaatgaaaaagcggctagtcaaaatagtcacaataattcgaaataataaaatcagaaccctcatttttgtgatgggaagtctgattctcttatttccgattgtgagccaggtaagttactaccttgcttcgcatcaaaatattaatcaatttaagcgggaagtcgctaagattgatactaatacggttgaacgacgcatcgctttagctaatgcttacaatgagacgttatcaaggaatcccttgcttatagacccttttaccagtaagcaaaaagaaggtttgagagagtatgctcgtatgcttgaagttcatgagcaaataggtcatgtggcaatcccaagtattggggttgatattccaatttatgctggaacatccgaaactgtgcttcagaaaggtagtgggcatttggagggaaccagtcttccagtgggaggtttgtcaacccattcagtactaactgcccaccgtggcttgccaacagctaggctatttaccgacttaaataaagttaaaaaaggccagattttctatgtgacgaacatcaaggaaacacttgcctacaaagtcgtgtctatcaaagttgtggatccaacagctttaagtgaggttaagattgtcaatggtaaggattatataaccttgctgacttgcacaccttacatgatcaatagtcatcgtctcttggtaaaaggagagcgtattccttatgattctaccgaggcggaaaagcacaaagaacaaaccgtacaagattatcgtttgtcactagtgttgaagatactactagtattattaattggactcttcatcgtgataatgatgagaagatggatgcaacatcgtcaataacgatgttgtgaatggcttacttacttatcaaataggtgactaatgatgattgtgaataatggttatctagaagggagaaaaatgaaaaagagacaaaaaatatggagagggttatcagttactttactaatcctgtcccaaattccatttggtatattggtacaaggtgaaacccaagataccaatcaagcacttggaaaagtaattgttaaaaaaacgggagacaatgctacaccattaggcaaagcgacttttgtgttaaaaaatgacaatgataagtcagaaacaagtcacgaaacggtagagggttctggagaagcaacctttgaaaacataaaacctggagactacacattaagagaagaaacagcaccaattggttataaaaaaactgataaaacctggaaagttaaagttgcagataacggagcaacaataatcgagggtatggatgcagataaagcagagaaacgaaaagaagttttgaatgcccaatatccaaaatcagctatttatgaggatacaaaagaaaattacccattagttaatgtagagggttccaaagttggtgaacaatacaaagcattgaatccaataaatggaaaagatggtcgaagagagattgctgaaggttggttatcaaaaaaaattacaggggtcaatgatctcgataagaataaatataaaattgaattaactgttgagggtaaaaccactgttgaaacgaaagaacttaatcaaccactagatgtcgttgtgctattagataattcaaatagtatgaataatgaaagagccaataattctcaaagagcattaaaagctggggaagcagttgaaaagctgattgataaaattacatcaaataaagacaatagagtagctcttgtgacatatgcctcaaccatttttgatggtactgaagcgaccgtatcaaagggagttgccgatcaaaatggtaaagcgctgaatgatagtgtatcatgggattatcataaaactacttttacagcaactacacataattacagttatttaaatttaacaaatgatgctaacgaagttaatattctaaagtcaagaattccaaaggaagcggagcatataaatggggatcgcacgctctatcaatttggtgcgacatttactcaaaaagctctaatgaaagcaaatgaaattttagagacacaaagttctaatgctagaaaaaaacttatttttcacgtaactgatggtgtccctacgatgtcttatgccataaattttaatccttatatatcaacatcttaccaaaaccagtttaattcttttttaaataaaataccagatagaagtggtattctccaagaggattttataatcaatggtgatgattatcaaatagtaaaaggagatggagagagttttaaactgttttcggatagaaaagttcctgttactggaggaacgacacaagcagcttatcgagtaccgcaaaatcaactctctgtaatgagtaatgagggatatgcaattaatagtggatatatttatctctattggagagattacaactgggtctatccatttgatcctaagacaaagaaagtttctgcaacgaaacaaatcaaaactcatggtgagccaacaacattatactttaatggaaatataagacctaaaggttatgacatttttactgttgggattggtgtaaacggagatcctggtgcaactcctcttgaagctgagaaatttatgcaatcaatatcaagtaaaacagaaaattatactaatgttgatgatacaaataaaatttatgatgagctaaataaatactttaaaacaattgttgaggaaaaacattctattgttgatggaaatgtgactgatcctatgggagagatgattgaattccaattaaaaaatggtcaaagttttacacatgatgattacgttttggttggaaatgatggcagtcaattaaaaaatggtgtggctcttggtggaccaaacagtgatgggggaattttaaaagatgttacagtgacttatgataagacatctcaaaccatcaaaatcaatcatttgaacttaggaagtggacaaaaagtagttcttacctatgatgtacgtttaaaagataactatataagtaacaaattttacaatacaaataatcgtacaacgctaagtccgaagagtgaaaaagaaccaaatactattcgtgatttcccaattcccaaaattcgtgatgttcgtgagtttccggtactaaccatcagtaatcagaagaaaatgggtgaggttgaatttattaaagttaataaagacaaacattcagaatcgcttttgggagctaagtttcaacttcagatagaaaaagatttttctgggtataagcaatttgttccagagggaagtgatgttacaacaaagaatgatggtaaaatttattttaaagcacttcaagatggtaactataaattatatgaaatttcaagtccagatggctatatagaggttaaaacgaaacctgttgtgacatttacaattcaaaatggagaagttacgaacctgaaagcagatccaaatgctaataaaaatcaaatcgggtatcttgaaggaaatggtaaacatcttattaccaacactcccaaacgcccaccaggtgtttttcctaaaacagggggaattggtacaattgtctatatattagttggttctacttttatgatacttaccatttgttctttccgtcgtaaacaattgtaaggtgtcgttgaaattattaaataatagaaaatgactagttttggcctttccctattgtcagtcagattagttattatcaagcttctcatgccaatattaatgcctttaaaagaacagttacaaccattgaccgtacggagattcaacgacggttaggtctggctaaagcctacaatgctagtatttctggaacaagtagtcagtcgactcaatctgtgctgagagattcttattctgaggagcaaaaaaggcagggtggactgaatacgctaggatgttagaagtcagagagcaggttgaccatgtgatgattccaaaaatcaatcaggatttaccaatctacgctggttcagaagaggacaatctgcaacggggagttggtcatctagaagggataagtttgccgattggaggggcttctacacatgcggtcttgagcggtcaaagaggtatgccagctgctcggttgtttgcggatttggataagatgaaaaaaggtgattatttttatgttaccaatctgaaagaaaccttggcttatcaagtggatcgtatcatggtgattgaacctagccaattggatgccgtgagcattgaagaggataaagattatgttacccttctgacctgtacaccttatatgggctctttgtcaactgtaatgggtgacttatcattaacaacgagagagaatcagcttggttctctctctttttggatgttcaaagcgatgagaattttgcttttaaaatttttaaagttgcgaaagccaaaggcttgtcgcttgatgtctttgataagcttgttggtcgcttctaatttggcattggaaagggatagctgagggcgtttgtgatgtaagttttgtacttcatgaaggtcctaaagaccattttaaaagcagaattgccagttgttacgttatcatctatgaagctaaagaattcagttgttcgcttttcttagaaatgaaagagtatgagctgataaaggtcgttataatagcggagctcatctgagaaaacttttatacctcaaagtcagtctagctttgatatcatgaagccattaggagttattccttatcttttagtggcgcgcgatccatatagtgatagatcgagatatttagatccaaaagttctatcatcctcttttggcgccttttttccagcagataatattaaggtagcttggtctaacaactccagcactttatttacaccacctattaatgcaaactacaccactcagattcaagctattgggacaacgattaagtcacaaattccggaatcgattttgacggttacggataaaaagagcaggaagttcagcattaacaagattgacgaagctaaagaaggcttagtaggtgcgaccttcaccttgtctaaacgcacaacagtagcggcagatcatcaagtacaaggagatttcattcctgtcagcaaagagacgacagtcggtcggacaacccttacctttgacaaccttaaacctggattttatgaccttaaagaaacgaaagcgccgaatgcttacgtacttgatcctaagacttatgttgtggtcgttcaaaattcaggaaaaacgacaattgtggatgaagctaacttcaaagaggctgattacccaatggctgataataccagccatgtggagtgcgtagcgttgctacaacgaagcaaagggtaaaaatcctttattttaagcactttttcaagcattttgtctttattgaaaagagtgattttaacataaaaaaggtattaaaaaacatattgacgtgaccgtttgttttgaagtggcttgcgtagacaaaaaaatagatacgtcagataaatttctggcattacgagaacatttttagagtgttctctttttttagtttacggaggaaaaatatatatggaaaaacaggattcacgagttctcatccattgggaggggaattctggggacaagctcattgaacaccaaaccagcgcaacggggtggtactaccaagtcgatcgtagctttagtcaaccaaaaggggaaccgcccagaatgatccaaaggcactagaaagtgtccgtaatgattcgatttcgggcggtgatgatgtcatgggttatgcttatagcaaatgtacttggggagttgcggcacgaattaatcagtgggactgaaactcaaaggttgaaatggtgagaagattaccattaccagttcaatgggaaatggtcaggattgggttggaacagccgaaagactagatggtgaaactgatacagttccaaaagaaggtactattctctctttttaggaaagtagttatggttcgtatataggctacggaactatatctttcgtcacattacatctacagatagtaccatgaattttgcttatatgaccaagtaaagtgaggatatactaacaaatgaaatatttattatcgtatttgtccattttatcgaaaagtttgcatattatcattatgtttgataagatgcaaatataatgatagtaggagctaaatatggatatttaaaaaatcaagagtatcctaagtgctttccattttgaaattcaaatatagctaatagttctagaacttctaattgtttttcgtcgacgatatgaattttcaatcttaactgttaggattccacctccctttggttaaagaaaaaaggtcaggtcgtttagataactttgtcaaacaagctcaagctatctaaaaatagtttgaaatgggcattactctagtttttaataagctatctgatgagcagaaggagaagttaatgcatgttgggaagtcttattttgactatcaagaaaatgctcttatcccacaattaggttttctatattctaaattaactaaaaaaattgaacttgataatcggttgtctccgactgaacaaaagttattgattaccttattattacatactaaaggtttaatcattgatatgtaagaagtaagtcagctaaccgatctttctattctaaaacttatattgttgctttagaaattttaaagagcgtggatggcttcataataaacagaaatcttaccaatttgcgaagccaaaaaatatgatatttgaagagtccaaagatctaatagatagtccagttagagaagcgttgattataagtgataaggattttcaaaaattaaaacaagagctattattttaaccgacttattttaaagacttatcatatctaggcttgcttgatgattcggaaaaatacggagactatactatttcaaggaaaagatacaaaagtttcgaatcaagtcttcaactatacatccttcaaagtcatcggctagagatttggaattatgaaccaatccctttgattactagaaaaataaatagcttggagaggctaacgtgacactggttgatccaatctcgctttatttaacactaagaatgatgaagaccctcgtattgaagaagaagttgagcagctagaagataagat

SEQ ID NO: 299 - DNA, 13006 bp, S. agalactiae
taacacggattggaaataacatcaatcaaattgcgcgtgctatcaaccaaagccatctaatttctcaggctcagtatcactttcatcgagaagcacgttaagcccaacagcagggggggttgctctgattcggttaagtaataagcaaaatcctcaccaattttcccagtaataagaggcgttgttgaggtatagggattacctgtgccatagtcgatgatggtcacaaaatgaccattccccataaaagggccaaccaaaacttcacctgtggccgttttttgatgtcaacaccagtattttggatgtaccccttaacatgccctttggtatctgcaacagagataatatgaccaaaggaagaatcaccgatgactttaaccgtaatcttgctatcgcctttttgattagccgctaatatttgattagcaatcagggtgcgaccaagagcaactgttgaagacgacaaggtatgatgtttttcctgagccaatttaacagtctcggtgctatcgaggacataagacctgaaggcaccagaggcagaaattgatttaataattttatccataacctatgttatagcacaaagagagagtttgtatggactggattagctgaaaattttagactaaaaagtagtgccagtggattttgaaaggtaacaaaagagtcttccgtttaaacgagaaggctgtttttagtcgtttcagatgaaggcaaaaggacgatgaaataattccgtaccttcatggattgctatgttactggcatgaggtctcacgatatttagtaagatattcgtttgaagatattcccacgtattttttaaaggttttaagaaaatgtgtggtgtcgtaaaaatgtaataatttcgctacttccccaatcggtacccctctttgcagtagtaattgtccctccttaatttttgcctttagaatataactttgcaaggaaatgtcagagtattttttaaaaactgagcgtaagtgggaatctgagatatataggtagttggcaatatcagatactttgagtttggagtagaggtggttgtccacataatggagaatactattgtacatttgctgcttgtcagagatgctcttattggttaaggattctgaaaaatcaataagagctgcacagcgaattcttgaaacatcaataagatcaggagcctcttcgtttaaagccatatagtgctttaccagcgcataacttttagccacatcagtattttcctcgaaacttaattctagtaattttgttaagtaaacaacagttaagttcttttcagctcttagggcagggattgaagatgaggtaacactggatgatgggaggcgattaatttcttgctttaacagttgagtgttacccagcttaacgagatcaataatgtgattgagatggtttaaaacagtgggtaactgaaaagagtttttcttagtatgttttaggtgaagaacaatatcaggatccgcaacaatctgttctgactcttctaataaatgattgatgacttgttggcaactagcctcaaactgtgtttggaaaaaggcatcgatagacacaagaagactacgtatactggtagtaggaaaacaagggacaagctttatataggataagatttcttttttactacgatgagaaaattgttctagaaagcgactggataactgttcttgcctattgatatcagggctatagggataaaatggtccaatagcaataagatattgacagacaggaaaaattaagaatgattcttcaaaaagaccctcataaacagtgatatcttggttataagggatagctaaatgttttaaaaactgatagtaaggcaacagatagtcttcgttactatataactgaacgagttccttgtctcgtgacatgactgaaataggtagttgagatatggtatgcaatgtttgaacatgtttaaaatcgaatgtaaccatttgatagaccgccttcattatcatttctagaatttttctttaggtttgtaaagactacaaaataaaatgatgaaaacaactatcttgtggatacactaaaaagacacgctaattagcaaactctctcttcatcatctctcaccattattatactactatttatatgacaaataaaggttattttgttaaaatataactttgaaaatccacatatatttttaatcttccgtctgaaaaaataaataaaaatagtaaaaataaacacgaatttaaaataagcaaattttttaagaaaatctgtgctaaactttaatagttttgtgcttaataataatcagcacttacaaagaacaaagggaaaagcgaggagagaacttttaatgaaattatcgaagaagttattgttttcggctgctgttttaacaatggtggcggggtcaactgttgaaccagtagctcagtttgcgactggaatgagtattgtaagagctgcagaagtgtcacaagaacgcccagcgaaaacaacagtaaatatctataaattacaagctgatagttataaatcggaaattacttctaatggtggtatcgagaataaagacggcgaagtaatatctaactatgctaaacttggtgacaatgtaaaaggtttgcaaggtgtacagtttaaacgttataaagtcaagacggatatttctgttgatgaattgaaaaaattgacaacagttgaagcagcagatgcaaaagttggaacgattcttgaagaaggtgtcagtctacctcaaaaaactaatgctcaaggtttggtcgtcgatgctctggattcaaaaagtaatgtgagatacttgtatgtagaagatttaaagaattcaccttcaaacattaccaaagcttatgctgtaccgtttgtgttggaattaccagttgctaactctacaggtacaggtttcctttctgaaattaatatttaccctaaaaacgttgtaactgatgaaccaaaaacagataaagatgttaaaaaattaggtcaggacgatgcaggttatacgattggtgaagaattcaaatggttcttgaaatctacaatccctgccaatttaggtgactatgaaaaatttgaaattactgataaatttgcagatggcttgacttataaatctgttggaaaaatcaagattggttcgaaaacactgaatagagatgagcactacactattgatgaaccaacagttgataaccaaaatacattaaaaattacgtttaaaccagagaaatttaaagaaattgctgagctacttaaaggaatgacccttgttaaaaatcaagatgctcttgataaagctactgcaaatacagatgatgcggcatttttggaaattccagttgcatcaactattaatgaaaaagcagttttaggaaaagcaattgaaaatacttttgaacttcaatatgaccatactcctgataaagctgacaatccaaaaccatctaatcctccaagaaaaccagaagttcatactggtgggaaacgatttgtaaagaaagactcaacagaaacacaaacactaggtggtgctgagtttgatttgttggcttctgatgggacagcagtaaaatggacagatgctcttattaaagcgaatactaataaaaactatattgctggagaagctgttactgggcaaccaatcaaattgaaatcacatacagacggtacgtttgagattaaaggtttggcttatgcagttgatgcgaatgcagagggtacagcagtaacttacaaattaaaagaaacaaaagcaccagaaggttatgtaatccctgataaagaaatcgagtttacagtatcacaaacatcttataatacaaaaccaactgacatcacggttgatagtgctgatgcaacacctgatacaattaaaaacaacaaacgtccttcaatccctaatactggtggtattggtacggctatctttgtcgctatcggtgctgcggtgatggcttttgctgttaaggggatgaagcgtcgtacaaaagataactaaataaaaggctacttcttaagtaaccatgtttaagaaaagagaaatagccttatttctctttttgtcgtttttaaaataaaggaacatcatgaaacaaacattaaaacttatgttttcttttctgttgatgttagggactatgtttggaattagccaaactgttttagcgcaagaaactcatcagttgacgattgttcatcttgaagcaagggatattgatcgtccaaatccacagttggagattgcccctaaagaagggactccaattgaaggagtactctatcagttgtaccaattaaaatcaactgaagatggcgatttgttggcacattggaattccctaactatcacagaattgaaaaaacaggcgcagcaggtttttgaagccactactaatcaacaaggaaaggctacatttaaccaactaccagatggaatttattatggtctggcggttaaagccggtgaaaaaaatcgtaatgtctcagctttcttggttgacttgtctgaggataaagtgatttatcctaaaatcatctggtccacaggtgagttggacttgcttaaagttggtgtggatggtgataccaaaaaaccactagcaggcgttgtctttgaactttatgaaaagaatggtaggactcctattcgtgtgaaaaatggggtgcattctcaagatattgacgctgcaaaacatttagaaacagattcatcagggcatatcagaatttccgggctcatccatggggactatgtcttaaaagaaatcgagacacagtcaggatatcagatcggacaggcagagactgctgtgactattgaaaaatcaaaaacagtaacagtaacgattgaaaataaaaaagttccgacacctaaagtgccatctcgaggaggtcttattcccaaaacaggtgagcaacaggcaatggcacttgtaattattggtggtattttaattgctttagccttacgattactatcaaaacatcggaaacatcaaaataaggattagcatgggacaaaaatcaaaaatatctctagctacgaatattcgtatatggatttttcgtttaattttcttagcgggtttccttgttttggcatttcccatcgttagtcaggtcatgtactttcaagcctctcacgccaatattaatgcttttaaagaagctgttaccaagattgaccgggtggagattaatcggcgtttagaacttgcttatgcttataacgccagtatagcaggtgccaaaactaatggcgaatatccagcgcttaaagacccctactctgctgaacaaaagcaggcaggggtcgttgagtacgcccgcatgcttgaagtcaaagaacaaataggtcatgtgattattccaagaattaatcaggatatccctatttacgctggctctgctgaagaaaatcttcagaggggcgttggacatttagaggggaccagtcttccagtcggtggtgagtcaactcatgccgttctaactgcccatcgagggctaccaacggccaagctatttaccaatttagacaaggtaacagtaggtgaccgtttttacattgaacacatcggcggaaagattgcttatcaggtagaccaaatcaaagttatcgcccctgatcagttagaggatttgtacgtgattcaaggagaagatcacgtcaccctattaacttgcacaccttatatgataaatagtcatcgcctcctcgttcgaggcaagcgaattccttatgtggaaaaaacagtgcagaaagattcaaagaccttcaggcaacaacaatacctaacctatgctatgtgggtagtcgttggacttatcttgctgtcgcttctcatttggtttaaaaagacgaaacagaaaaagcggagaaagaatgaaaaagcggctagtcaaaatagtcacaataattcgaaataataaaatcagaaccctcatttttgtgatgggaagtctgattctcttatttccgattgtgagccaggtaagttactaccttgcttcgcatcaaaatattaatcaatttaagcgggaagtcgctaagattgatactaatacggttgaacgacgcatcgctttagctaatgcttacaatgagacgttatcaaggaatcccttgcttatagacccttttaccagtaagcaaaaagaaggtttgagagagtatgctcgtatgcttgaagttcatgagcaaataggtcatgtggcaatcccaagtattggggttgatattccaatttatgctggaacatccgaaactgtgcttcagaaaggtagtgggcatttggagggaaccagtcttccagtgggaggtttgtcaacccattcagtactaactgcccaccgtggcttgccaacagctaggctatttaccgacttaaataaagttaaaaaaggccagattttctatgtgacgaacatcaaggaaacacttgcctacaaagtcgtgtctatcaaagttgtggatccaacagctttaagtgaggttaagattgtcaatggtaaggattatataaccttgctgacttgcacaccttacatgatcaatagtcatcgtctcttggtaaaaggagagcgtattccttatgattctaccgaggcggaaaagcacaaagaacaaaccgtacaagattatcgtttgtcactagtgttgaagatactactagtattattaattggactcttcatcgtgataatgatgagaagatggatgcaacatcgtcaataacgatgttgtgaatggcttacttacttatcaaataggtgactaatgatgattgtgaataatggttatctagaagggagaaaaatgaaaaagagacaaaaaatatggagagggttatcagttactttactaatcctgtcccaaattccatttggtatattggtacaaggtgaaacccaagataccaatcaagcacttggaaaagtaattgttaaaaaaacgggagacaatgctacaccattaggcaaagcgacttttgtgttaaaaaatgacaatgataagtcagaaacaagtcacgaaacggtagagggttctggagaagcaacctttgaaaacataaaacctggagactacacattaagagaagaaacagcaccaattggttataaaaaaactgataaaacctggaaagttaaagttgcagataacggagcaacaataatcgagggtatggatgcagataaagcagagaaacgaaaagaagttttgaatgcccaatatccaaaatcagctatttatgaggatacaaaagaaaattacccattagttaatgtagagggttccaaagttggtgaacaatacaaagcattgaatccaataaatggaaaagatggtcgaagagagattgctgaaggttggttatcaaaaaaaaatacaggggtcaatgatctcgataagaataaatataaaattgaattaactgttgagggtaaaaccactgttgaaacgaaagaacttaatcaaccactagatgtcgttgtgctattagataattcaaatagtatgaataatgaaagagccaataattctcaaagagcattaaaagctggggaagcagttgaaaagctgattgataaaattacatcaaataaagacaatagagtagctcttgtgacatatgcctcaaccatttttgatggtactgaagcgaccgtatcaaagggagttgccgatcaaaatggtaaagcgctgaatgatagtgtatcatgggattatcataaaactacttttacagcaactacacataattacagttatttaaatttaacaaatgatgctaacgaagttaatattctaaagtcaagaattccaaaggaagcggagcatataaatggggatcgcacgctctatcaatttggtgcgacatttactcaaaaagctctaatgaaagcaaatgaaattttagagacacaaagttctaatgctagaaaaaaacttatttttcacgtaactgatggtgtccctacgatgtcttatgccataaattttaatccttatatatcaacatcttaccaaaaccagtttaattcttttttaaataaaataccagatagaagtggtattctccaagaggattttataatcaatggtgatgattatcaaatagtaaaaggagatggagagagttttaaactgttttcggatagaaaagttcctgttactggaggaacgacacaagcagcttatcgagtaccgcaaaatcaactctctgtaatgagtaatgagggatatgcaattaatagtggatatatttatctctattggagagattacaactgggtctatccatttgatcctaagacaaagaaagtttctgcaacgaaacaaatcaaaactcatggtgagccaacaacattatactttaatggaaatataagacctaaaggttatgacatttttactgttgggattggtgtaaacggagatcctggtgcaactcctcttgaagctgagaaatttatgcaatcaatatcaagtaaaacagaaaattatactaatgttgatgatacaaataaaatttatgatgagctaaataaatactttaaaacaattgttgaggaaaaacattctattgttgatggaaatgtgactgatcctatgggagagatgattgaattccaattaaaaaatggtcaaagttttacacatgatgattacgttttggttggaaatgatggcagtcaattaaaaaatggtgtggctcttggtggaccaaacagtgatgggggaattttaaaagatgttacagtgacttatgataagacatctcaaaccatcaaaatcaatcatttgaacttaggaagtggacaaaaagtagttcttacctatgatgtacgtttaaaagataactatataagtaacaaattttacaatacaaataatcgtacaacgctaagtccgaagagtgaaaaagaaccaaatactattcgtgatttcccaattcccaaaattcgtgatgttcgtgagtttccggtactaaccatcagtaatcagaagaaaatgggtgaggttgaatttattaaagttaataaagacaaacattcagaatcgcttttgggagctaagtttcaacttcagatagaaaaagatttttctgggtataagcaatttgttccagagggaagtgatgttacaacaaagaatgatggtaaaatttattttaaagcacttcaagatggtaactataaattatatgaaatttcaagtccagatggctatatagaggttaaaacgaaacctgttgtgacatttacaattcaaaatggagaagttacgaacctgaaagcagatccaaatgctaataaaaatcaaatcgggtatcttgaaggaaatggtaaacatcttattaccaacactcccaaacgcccaccaggtgtttttcctaaaacagggggaattggtacaattgtctatatattagttggttctacttttatgatacttaccatttgttctttccgtcgtaaacaattgtaaggtgtcgttgaaattattaaataatagaaaatgactagttttggcctttccctattgtcagtcagattagttattatcaagcttctcatgccaatattaatgcctttaaaagaacagttacaaccattgaccgtacggagattcaacgacggttaggtctggctaaagcctacaatgctagtatttctggaacaagtagtcagtcgactcaatctgtgctgagagattcttattctgaggagcaaaaaaggcagggtggactgaatacgctaggatgttagaagtcagagagcaggttgaccatgtgatgattccaaaaatcaatcaggatttaccaatctacgctggttcagaagaggacaatctgcaacggggagttggtcatctagaagggataagtttgccgattggaggggcttctacacatgcggtcttgagcggtcaaagaggtatgccagctgctcggttgtttgcggatttggataagatgaaaaaaggtgattatttttatgttaccaatctgaaagaaaccttggcttatcaagtggatcgtatcatggtgattgaacctagccaattggatgccgtgagcattgaagaggataaagattatgttacccttctgacctgtacaccttatatgggctctttgtcaactgtaatgggtgacttatcattaacaacgagagagaatcagcttggttctctctctttttggatgttcaaagcgatgagaattttgcttttaaaatttttaaagttgcgaaagccaaaggcttgtcgcttgatgtctttgataagcttgttggtcgcttctaatttggcattggaaagggatagctgagggcgtttgtgatgtaagttttgtacttcatgaaggtcctaaagaccattttaaaagcagaattgccagttgttacgttatcatctatgaagctaaagaattcagttgttcgcttttcttagaaatgaaagagtatgagctgataaaggtcgttataatagcggagctcatctgagaaaacttttatacctcaaagtcagtctagctttgatatcatgaagccattaggagttattccttatcttttagtggcgcgcgatccatatagtgatagatcgagatatttagatccaaaagttctatcatcctcttttggcgccttttttccagcagataatattaaggtagcttggtctaacaactccagcactttatttacaccacctattaatgcaaactacaccactcagattcaagctattgggacaacgattaagtcacaaattccggaatcgattttgacggttacggataaaaagagcaggaagttcagcattaacaagattgacgaagctaaagaaggcttagtaggtgcgaccttcaccttgtctaaacgcacaacagtagcggcagatcatcaagtacaaggagatttcattcctgtcagcaaagagacgacagtcggtcggacaacccttacctttgacaaccttaaacctggattttatgaccttaaagaaacgaaagcgccgaatgcttacgtacttgatcctaagacttatgttgtggtcgttcaaaattcaggaaaaacgacaattgtggatgaagctaacttcaaagaggctgattacccaatggctgataataccagccatgtggagtgcgtagcgttgctacaacgaagcaaagggtaaaaatcctttattttaagcactttttcaagcattttgtctttattgaaaagagtgattttaacataaaaaaggtattaaaaaacatattgacgtgaccgtttgttttgaagtggcttgcgtagacaaaaaaatagatacgtcagataaatttctggcattacgagaacatttttagagtgttctctttttttagtttacggaggaaaaatatatatggaaaaacaggattcacgagttctcatccattgggaggggaattctggggacaagctcattgaacaccaaaccagcgcaatggggtggtactaccaagtcgatcgtagctttagtcaaccaaaaggggaaccgcccagaatgatccaaaggcactagaaagtgtccgtaatgattcgatttcgggcggtgatgatgtcatgggttatgcttatagcaaatgtacttggggagttgcggcacgaattaatcagtgggactgaaactcaaaggttgaaatggtgagaagattaccattaccagttcaatgggaaatggtcaggattgggttggaacagccgaaagactagatggtgaaactgatacagttccaaaagaaggtactattctctctttttaggaaagtagttatggttcgtatataggctacggaactatatctttcgtcacattacatctacagatagtaccatgaattttgcttatatgaccaagtaaagtgaggatatactaacaaatgaaatatttattatcgtatttgtccattttatcgaaaagtttgcatattatcattatgtttgataagatgcaaatataatgatagtaggagctaaatatggatatttaaaaaatcaagagtatcctaagtgctttccattttgaaattcaaatatagctaatagttctagaacttctaattgtttttcgtcgacgatatgaattttcaatcttaactgttaggattccacctccctttggttaaagaaaaaaggtcaggtcgtttagataactttgtcaaacaagctcaagctatctaaaaatagtttgaaatgggcattactctagtttttaataagctatctgatgagcagaaggagaagttaatgcatgttgggaagtcttattttgactatcaagaaaatgctcttatcccacaattaggttttctatattctaaattaactaaaaaaattgaacttgataatcggttgtctccgactgaacaaaagttattgattaccttattattacatactaaaggtttaatcattgatatgtaagaagtaagtcagctaaccgatctttctattctaaaacttatattgttgctttagaaattttaaagagcgtggatggcttcataataaacagaaatcttaccaatttgcgaagccaaaaaatatgatatttgaagagtccaaagatctaatagatagtccagttagagaagcgttgattataagtgataaggattttcaaaaattaaaacaagagctattattttaaccgacttattttaaagacttatcatatctaggcttgcttgatgattcggaaaaatacggagactatactatttcaaggaaaagatacaaaagtttcgaatcaagtcttcaactatacatccttcaaagtcatcggctagagatttggaattatgaaccaatccctttgattactagaaaaataaatagcttggagaggctaacgtgacactggttgatccaatctcgctttatttaacactaagaatgatgaagaccctcgtattgaagaagaagttgagcagctagaagataagat

SEQ ID NO: 300 - DNA, 13000 bp, S. agalactiae
taacacggattggaaataacatcaatcaaatttcgcgtgctatcaaccaaagccatctaatttctcaggctcagtatcactttcatcgagaagcacgttaagcccaacagcagggggggtgctctgattcggttaagtaataagcaaaatcctcaccaattttcccagtaataagaggcgttgttgaggtatagggattacctgtgccatagtcgatgatggtcacaaaatgaccattccccataaaagggccaaccaaaacttcacctgtggccgttttttgatgtcaacaccagtattttggatgtaccccttaacatgccctttggtatctgcaacagagataatatgaccaaaggaagaatcaccgatgactttaaccgtaatcttgctatcgcctttttgattagccgctaatatttgattagcaatcagggtgcgaccaagagcaactgttgaagacgacaaggtatgatgtttttcctgagccaatttaacagtctcggtgctatcgaggacataagacctgaaggcaccagaggcagaaattgatttaataattttatccataacctatgttatagcacaaagagagagtttgtatggactggattagctgaaaattttagactaaaaagtagtgccagtggattttgaaaggtaacaaaagagtcttccgtttaaacgagaaggctgtttttagtcgtttcagatgaaggcaaaaggacgatgaaataattccgtaccttcatggattgctatgttactggcatgaggtctcacgatatttagtaagatattcgtttgaagatattcccacgtattttttaaaggttttaagaaaatgtgtggtgtcgtaaaaatgtaataatttcgctacttccccaatcggtacccctctttgcagtagtaattgtccctccttaatttttgcctttagaatataactttgcaaggaaatgtcagagtattttttaaaaaccgagcgtaagtgggaatttgagatatataggtagttggcaatatcagatactttgagtttggagtagaggtggttgtccacataatggagaatactattgtacatttgctgcttgtcagagatgctcttattggttaaggattctgaaaaatcaataagagctgcacagcgaattcttgaaacatcaataagatcaggagcctcttcgtttaaagccatatagtgctttaccagcgcataacttttagccacatcagtatttttctcgaaacttaattctagtaattttgttaagtaaacaacagttaagttcttttcagctcttagggcagggattgaagatgaggtaacactggatgatgggaggcgattaatttcttgctttaacagttgagtgttacccagcttaacgagatcaataatgtgattgagatggtttaaaacagtgggtaactgaaaagagtttttcttagtatgttttaggtgaagaacaatatcaggatccgcaacaatctgttctgactcttctaataaatgattgatggcttgttggcaactagcctcaaactgtgtttggaaaaaggcatcgatagacacaagaagactacgtatactggtagtaggaaaacaagggacaagctttatataggataagatttcttttttactacgatgagaaaattgttctagaaagcgactggataactgttcttgcctattgatatcagggctatagggataaaatggtccaatagcaataagatattgacagacaggaaaaattaagaatgattcttcaaaaagaccctcataaacagtgatatcttggttataagggatagctaaatgttttaaaaactgatagtaaggcaacagatagtcttcgttaccatataactgaacgagttccttgtctcgtgacatgactgaaataggtagttgagatatggtatgcaatgtttgaacatgtttaaaatcgaatgtaaccatttgatagaccgccttcattatcatttctagaatttttctttaggtttgtaaagactacaaaataaaatgatgaaaacaactatcttgtggatacactaaaaagacacgctaattagcaaactctctcttcatcatctctcaccattattatactactatttatatgacaaataaaggtgattttgttaaaaatataactttgaaaatccacatatatttttaatcttccgtctgaaaaaataaataaaaatagtaaaaataaacacgaatttaaaataagcaaattttttaagaaaatctgtgctaaactttaatagttttgtgcttaataataatcagcacttacaaagaacaaagggaaaagcgaggagagaacttttaatgaaattatcgaagaagttattgttttcggctgctgttttaacaatagtggcggggtcaactgttgaaccagtagctcagtttgcgactggaatgagtattgtaagagctgcagaagtgtcacaagaacgcccagcgaaaacaacagtaaatatctataaattacaagctgatagttataaatcggaaattacttctaatggtggtatcgagaataaagacggcgaagtaatatctaactatgctaaacttggtgacaatgtaaaaggtttgcaaggtgtacagtttaaacgttataaagtcaagacggatatttctgttgatgaattgaaaaaattgacaacagttgaagcagcagatgcaaaagttggaacgattcttgaagaaggtgtcagtctacctcaaaaaactaatgctcaaggtttggtcgtcgatgctctggattcaaaaagtaatgtgagatacttgtatgtagaagatttaaagaattcaccttcaaacattaccaaagcttatgctgtaccgtttgtgttggaattaccagttgctaactctacaggtacaggtttcctttctgaaattaatatttaccctaaaaacgttgtaactgatgaaccaaaaacagataaagatgttaaaaaattaggtcaggacgatgcaggttatacgattggtgaagaattcaaatggttcttgaaatctacaatccctgccaatttaggtgactatgaaaaatttgaaattactgataaatttgcagatggcttgacttataaatctgttggaaaaatcaagattggttcgaaaacactgaatagagatgagcactacactattgatgaaccaacagttgataaccaaaatacattaaaaattacgtttaaaccagagaaatttaaagaaattgctgagctacttaaaggaatgacccttgttaaaaatcaagatgctcttgataaagctactgcaaatacagatgatgcggcatttttggaaattccagttgcatcaactattaatgaaaaagcagttttaggaaaagcaattgaaaatacttttgaacttcaatatgaccatactcctgataaagctgacaatccaaaaccatctaatcctccaagaaaaccagaagttcatactggtgggaaacgatttgtaaagaaagactcaacagaaacacaaacactaggtggtgctgagtttgatttgttggcttctgatgggacagcagtaaaatggacagatgctcttattaaagcgaatactaataaaaactatattgctggagaagctgttactgggcaaccaatcaaattgaaatcacatacagacggtacgtttgagattaaaggtttggcttatgcagttgatgcgaatgcagagggtacagcagtaacttacaaattaaaagaaacaaaagcaccagaaggttatgtaatccctgataaagaaatcgagtttacagtatcacaaacatcttataatacaaaaccaactgacatcacggttgatagtgctgatgcaacacctgatacaattaaaaacaacaaacgtccttcaatccctaatactggtggtattggtacggctatctttgtcgctatcggtgctgcggtgatggcttttgctgttaaggggatgaagcgtcgtacaaaagataactaaataaaaggctacttcttaagtaaccatgtttaagaaaagagaaatagccttatttctctttttgtcgtttttaaaataaaggaacatcatgaaacaaacattaaaacttatgttttcttttctgttgatgttagggactatgtttggaattagccaaactgttttagcgcaagaaactcatcagttgacgattgttcatcttgaagcaagggatattgatcgtccaaatccacagttggagattgcccctaaagaagggactccaattgaaggagtactctatcagttgtaccaattaaaatcaactgaagatggcgatttgttggcacattggaattccctaactatcacagaattgaaaaaacaggcgcagcaggtttttgaagccactactaatcaacaaggaaaggctacatttaaccaactaccagatggaatttattatggtctggcggttaaagccggtgaaaaaaatcgtaatgtctcagctttcttggttgacttgtctgaggataaagtgatttatcctaaaatcatctggtccacaggtgagttggacttgcttaaagttggtgtggatggtgataccaaaaaaccactagcaggcgttgtctttgaactttatgaaaagaatggtaggactcctattcgtgtgaaaaatggggtgcattctcaagatattgacgctgcaaaacatttagaaacagattcatcagggcatatcagaatttccgggctcatccatggggactatgtcttaaaagaaatcgagacacagtcaggatatcagatcggacaggcagagactgctgtgactattgaaaaatcaaaaacagtaacagtaacgattgaaaataaaaaagttccgacacctaaagtgccatctcgaggaggtcttattcccaaaacaggtgagcaacaggcaatggcacttgtaattattggtggtattttaattgctttagccttacgattactatcaaaacatcggaaacatcaaaataaggattagcatgggacaaaaatcaaaaatatctctagctacgaatattcgtatatggatttttcgtttaattttcttagcgggtttccttgttttggcatttcccatcgttagtcaggtcatgtactttcaagcctctcacgccaatattaatgcttttaaagaagctgttaccaagattgaccgggtggagattaatcggcgtttagaacttgcttatgcttataacgccagtatagcaggtgccaaaactaatggcgaatatccagcgcttaaagacccctactctgctgaacaaaagcaggcaggggtcgttgagtacgcccgcatgcttgaagtcaaagaacaaataggtcatgtgattattccaagaattaatcaggatatccctatttacgctggctctgctgaagaaaatcttcagaggggcgttggacatttagaggggaccagtcttccagtcggtggtgagtcaactcatgccgttctaactgcccatcgagggctaccaacggccaagctatttaccaatttagacaaggtaacagtaggtgaccgtttttacattgaacacatcggcggaaagattgcttatcaggtagaccaaatcaaagttatcgcccctgatcagttagaggatttgtacgtgattcaaggagaagatcacgtcaccctattaacttgcacaccttatatgataaatagtcatcgcctcctcgttcgaggcaagcgaattccttatgtggaaaaaacagtgcagaaagattcaaagaccttcaggcaacaacaatacctaacctatgctatgtgggtagtcgttggacttatcttgctgtcgcttctcatttggtttaaaaagacgaaacagaaaaagcggagaaagaatgaaaaagcggctagtcaaaatagtcacaataattcgaaataataaaatcagaaccctcatttttgtgatgggaagtctgattctcttatttccgattgtgagccaggtaagttactaccttgcttcgcatcaaaatattaatcaatttaagcgggaagtcgctaagattgatactaatacggttgaacgacgcatcgctttagctaatgcttacaatgagacgttatcaaggaatcccttgcttatagacccttttaccagtaagcaaaaagaaggtttgagagagtatgctcgtatgcttgaagttcatgagcaaataggtcatgtggcaatcccaagtattggggttgatattccaatttatgctggaacatccgaaactgtgcttcagaaaggtagtgggcatttggagggaaccagtcttccagtgggaggtttgtcaacccattcagtactaactgcccaccgtggcttgccaacagctaggctatttaccgacttaaataaagttaaaaaaggccagattttctatgtgacgaacatcaaggaaacacttgcctacaaagtcgtgtctatcaaagttgtggatccaacagctttaagtgaggttaagattgtcaatggtaaggattatataaccttgctgacttgcacaccttacatgatcaatagtcatcgtctcttggtaaaaggagagcgtattccttatgattctaccgaggcggaaaagcacaaagaacaaaccgtacaagattatcgtttgtcactagtgttgaagatactactagtattattaattggactcttcatcgtgataatgatgagaagatggatgcaacatcgtcaataacgatgttgtgaatggcttacttacttatcaaataggtgactaatgatgattgtgaataatggttatctagaagggagaaaaatgaaaaagagacaaaaaatatggagagggttatcagttactttactaatcctgtcccaaattccatttggtatattggtacaaggtgaaacccaagataccaatcaagcacttggaaaagtaattgttaaaaaaacgggagacaatgctacaccattaggcaaagcgacttttgtgttaaaaaatgacaatgataagtcagaaacaagtcacgaaacggtagagggttctggagaagcaacctttgaaaacataaaacctggagactacacattaagagaagaaacagcaccaattggttataaaaaaactgataaaacctggaaagttaaagttgcagataacggagcaacaataatcgagggtatggatgcagataaagcagagaaacgaaaagaagttttgaatgcccaatatccaaaatcagctatttatgaggatacaaaagaaaattacccattagttaatgtagagggttccaaagttggtgaacaatacaaagcattgaatccaataaatggaaaagatggtcgaagagagattgctgaaggttggttatcaaaaaaaattacaggggtcaatgatctcgataagaataaatataaaattgaattaactgttgagggtaaaaccactgttgaaacgaaagaacttaatcaaccactagatgtcgttgtgctattagataattcaaatagtatgaataatgaaagagccaataattctcaaagagcattaaaagctggggaagcagttgaaaagctgattgataaaattacatcaaataaagacaatagagtagctcttgtgacatatgcctcaaccatttttgatggtactgaagcgaccgtatcaaagggagttgccgatcaaaatggtaaagcgctgaatgatagtgtatcatgggattatcataaaactacttttacagcaactacacataattacagttatttaaatttaacaaatgatgctaacgaagttaatattctaaagtcaagaattccaaaggaagcggagcatataaatggggatcgcacgctctatcaatttggtgcgacatttactcaaaaagctctaatgaaagcaaatgaaattttagagacacaaagttctaatgctagaaaaaaacttatttttcacgtaactgatggtgtccctacgatgtcttatgccataaattttaatccttatatatcaacatcttaccaaaaccagtttaattcttttttaaataaaataccagatagaagtggtattctccaagaggattttataatcaatggtgatgattatcaaatagtaaaaggagatggagagagttttaaactgttttcggatagaaaagttcctgttactggaggaacgacacaagcagcttatcgagtaccgcaaaatcaactctctgtaatgagtaatgagggatatgcaattaatagtggatatatttatctctattggagagattacaactgggtctatccatttgatcctaagacaaagaaagtttctgcaacgaaacaaatcaaaactcatggtgagccaacaacattatactttaatggaaatataagacctaaaggttatgacatttttactgttgggattggtgtaaacggagatcctggtgcaactcctcttgaagctgagaaatttatgcaatcaatatcaagtaaaacagaaaattatactaatgttgatgatacaaataaaatttatgatgagctaaataaatactttaaaacaattgttgaggaaaaacattctattgttgatggaaatgtgactgatcctatgggagagatgattgaattccaattaaaaaatggtcaaagttttacacatgatgattacgttttggttggaaatgatggcagtcaattaaaaaatggtgtggctcttggtggaccaaacagtgatgggggaattttaaaagatgttacagtgacttatgataagacatctcaaaccatcaaaatcaatcatttgaacttaggaagtggacaaaaagtagttcttacctatgatgtacgtttaaaagataactatataagtaacaaattttacaatacaaataatcgtacaacgctaagtccgaagagtgaaaaagaaccaaatactattcgtgatttcccaattcccaaaattcgtgatgttcgtgagtttccggtactaaccatcagtaatcagaagaaaatgggtgaggttgaatttattaaagttaataaagacaaacattcagaatcgcttttgggagctaagtttcaacttcagatagaaaaagatttttctgggtataagcaatttgttccagagggaagtgatgttacaacaaagaatgatggtaaaatttattttaaagcacttcaagatggtaactataaattatatgaaatttcaagtccagatggctatatagaggttaaaacgaaacctgttgtgacatttacaattcaaaatggagaagttacgaacctgaaagcagatccaaatgctaataaaaatcaaatcgggtatcttgaaggaaatggtaaacatcttattaccaacactcccaaacgcccaccaggtgtttttcctaaaacagggggaattggtacaattgtctatatattagttggttctacttttatgatacttaccatttgttctttccgtcgtaaacaattgtaaggtgtcgttgaaattattaaataatagaaaatgactagttttggcctttccctattgtcagtcagattagttattatcaagcttctcatgccaatattaatgcctttaaaagaacagttacaaccattgaccgtacggagattcaacgacggttaggtctggctaaagcctacaatgctagtatttctggaacaagtagtcagtcgactcaatctgtgctgagagattcttattctgaggagcaaaaaaggcagggtggactgaatacgctaggatgttagaagtcagagagcaggttgaccatgtgatgattccaaaaatcaatcaggatttaccaatctacgctggttcagaagaggacaatctgcaacggggagttggtcatctagaagggataagtttgccgattggaggggcttctacacatgcggtcttgagcggtcaaagaggtatgtcagctgctcggttgtttgcggatttggataagatgaaaaaaggtgattatttttatgttaccaatctgaaagaaaccttggcttatcaagtggatcgtatcatggtgattgaacctagccaattggatgccgtgagcattgaagaggataaagattatgttacccttctgacctgtacaccttatatgggctctttgtcaactgtaatgggtgacttatcattaacaacgagagagaatcagcttggttctctctctttttggatgttcaaagcgatgagaattttgcttttaaaatttttaaagttgcgaaagccaaaggcttgtcgcttgatgtctttgataagcttgttggtcgcttctaatttggcattggaaagggatagctgagggcgtttgtgatgtaagttttgtacttcatgaaggtcctaaagaccattttaaaagcagaattgccagttgttacgttatcatctatgaagctaaagaattcagttgttcgcttttcttagaaatgaaagagtatgagctgataaaggtcgttataatagcggagctcatctgagaaaacttttatacctcaaagtcagtctagctttgatatcatgaagccattaggagttattccttatcttttagtggcgcgcgatccatatagtgatagatcgagatatttagatccaaaagttctatcatcctcttttggcgccttttttccagcagataatattaaggtagcttggtctaacaactccagcactttatttacaccacctattaatgcaaactacaccactcagattcaagctattgggacaacgattaagtcacaaattccggaatcgattttgacggttacggataaaaagagcaggaagttcagcattaacaagattgacgaagctaaagaaggcttagtaggtgcgaccttcaccttgtctaaacgcacaacagtagcggcagatcatcaagtacaaggagatttcattcctgtcagcaaagagacgacagtcggtcggacaactcttacctttgacaaccttaaacctggattttatgaccttaaagaaacgaaagcgccgaatgcttacgtacttgatcctaagacttatgttgtggtcgttcaaaattcaggaaaaacgacaattgtggatgaagctaacttcaaagaggctgattacccaatggctgataataccagccatgtggagtgcgtagcgttgctacaacgaagcaaagggtaaaaatcctttattttaagcactttttcaagcattttgtctttattgaaaagagtgattttaacataaaaaaggtattaaaaaacatattgacgtgaccgtttgttttgaagtggcttgcgtagacaaaaaaatagatacgtcagataaatttctggcattacgagaacatttctagagtgttctctttttttagtttacggaggaaaaatatatatggaaaaacaggattcacgagttctcatccattgggaggggaattctggggacaagctcattgaacaccaaaccagcgcaacggggtggtactaccaagtcgatcgtagctttagtcaaccaaaaggggaaccgcccagaatgatccaaaggcactagaaagtgtccgtaatgattcgatttcgggcggtgatgatgtcatgggttatgcttatagcaaatgtacttggggagttgcggcacgaattaatcagtgggactgaaactcaaaggttgaaatggtgagaagattaccattaccagttcaatgggaaatggtcaggattgggttggaacagccgaaagactagatggtgaaactgatacagttccaaaagaaggtactattctctctttttaggaaagtagttatggttcgtatataggctacggaactatatctttcgtcacattacatctacagatagtaccatgaattttgcttatatgaccaagtaaagtgaggatatactaacaaatgaaatatttattatcgtatttgtccattttatcgaaaagtttgcatattatcattatgtttgataagatgcaaatataatgatagtaggagctaaatatggatatttaaaaaatcaagagtatcctaagtgctttccattttgaaattcaaatatagctaatagttctagaacttctaattgtttttcgtcgacgatatgaattttcaatcttaactgttaggattccacctccctttggttaaagaaaaaaggtcaggtcgtttagataactttgtcaaacaagctcaagctatctaaaaatagtttgaaatgggcattactctagtttttaataagctatctgatgagcagaaggagaagttaatgcatgttgggaagtcttattttgactatcaagaaaatgctcttatcccacaattaggttttctatattctaaattaactaaaaaaattgaacttgataatcggttgtctccgactgaacaaaagttattgattaccttattattacatactaaaggtttaatcattgatatgtaagaagtaagtcagctaaccgatctttctattctaaaacttatattgttgctttagaaattttaaagagcgtggatggcttcataataaacagaaatcttaccaatttgcgaagccaaaaaatatgatatttgaagagtccaaagatctaatagatagtccagttagagaagcgttgattataagtgataaggattttcaaaaattaaaacaagagctattattttaaccgacttattttaaagacttatcatatctaggcttgcttgatgattcggaaaaatacggagactatactatttcaaggaaaagatacaaaagtttcgaatcaagtcttcaactatacatccttcaaagtcatcggctagagatttggaattatgaaccaatccctttgattactagaaaaataaatagcttggagaggctaacgtgacactggttgatccaatctcgctttatttaacactaagaatgatgaagaccctcgtattgaagaagaagttgagcagctagaaga

SEQ ID NO: 301 - DNA, 13000 bp, S. agalactiae
taacacggattggaaataacatcaatcaaattgcgcgtgctatcaaccaaagccatctaatttctcaggctcagtatcactttcatcgagaagcacgttaagcccaacagcaggggggggtgctctgattcggttaagtaataagcaaaatcctcaccaattttcccagtaataagaggcgttgttgaggtatagggattacctgtgccatagtcgatgatggtcacaaaatgaccattccccataaaagggccaaccaaaacttcacctgtggccgttttttgatgtcaacaccagtattttggatgtaccccttaacatgccctttggtatctgcaacagagataatatgaccaaaggaagaatcaccgatgactttaaccgtaatcttgctatcgcctttttgattagccgctaatatttgattagcaatcagggtgcgaccaagagcaactgttgaagacgacaaggtatgatgtttttcctgagccaatttaacagtctcggtgctatcgaggacataagacctgaaggcaccagaggcagaaattgatttaataattttatccataacctatgttatagcacaaagagagagtttgtatggactggattagctgaaaattttagactaaaaagtagtgccagtggattttgaaaggtaacaaaagagtcttccgtttaaacgagaaggctgtttttagtcgtttcagatgaaggcaaaaggacgatgaaataattccgtaccttcatggattgctatgttactggcatgaggtctcacgatatttagtaagatattcgtttgaagatattcccacgtattttttaaaggttttaagaaaatgtgtggtgtcgtaaaaatgtaataatttcgctacttccccaatcggtacccctctttgcagtagtaattgtccctccttaatttttgcctttagaatataactttgcaaggaaatgtcagagtattttttaaaaaccgagcgtaagtgggaatctgagatatataggtagttggcaatatcagatactttgagtttggagtagaggtggttgtccacataatggagaatactattgtacatttgctgcttgtcagagatgctcttattggttaaggattctgaaaaatcaataagagctgcacagcgaattcttgaaacatcaataagatcaggagcctattcgtttaaagccatatagtgctttaccagcgcataacttttagccacatcagtattttcctcgaaacttaattctagtaattttgttaagtaaacaacagttaagttcttttcagctcttagggcagggattgaagatgaggtaacactggatgatgggaggcgattaatttcttgctttaacagttgagtgttacccagcttaacgagatcaataatgtgattgagatggtttaaaacagtgggtaactgaaaagagtttttcttagtatgttttaggtgaagaacaatatcaggatccgcaacaatctgttctgactcttctaataaatgattgatggcttgttggcaactagcctcaaactgtgtttggaaaaaggcatcgatagacacaagaagactacgtatactggtagtaggaaaacaagggacaagctttatataggataagatttcttttttactacgatgagaaaattgttctagaaagcgactggataactgttcttgcctattgatatcagggctatagggataaaatggtccaatagcaataagatattgacagacaggaaaaattaagaatgattcttcaaaaagaccctcataaacagtgatatcttggttataagggatagctaaatgttttaaaaactgatagtaaggcaacagatagtcttcgttaccatataactgaacgagttccttgtctcgtgacatgactgaaataggtagttgagatatggtatgcaatgtttgaacatgtttaaaatcgaatgtaaccatttgatagaccgccttcattatcatttctagaatttttctttaggtttgtaaagactacaaaataaaatgatgaaaacaactatcttgtggatacactaaaaagacacgctaattagcaaactctctcttcatcatctctcaccattattatactactatttatatgacaaataaaggtgattttgttaaaaatataactttgaaaatccacatatatttttaatcttccgtctgaaaaaaataaataaaaatagtaaaaataaacacgaatttaaaataagcaaattttttaagaaaatctgtgctaaactttaatagttttgtgcttaataataatcagcacttacaaagaacaaagggaaaagcgaggagagaacttttaatgaaattatcgaagaagttattgttttcggctgctgttttaacaatggtggcggggtcaactgttgaaccagtagctcagtttgcgactggaatgagtattgtaagagctgcagaagtgtcacaagaacgcccagcgaaaacaacagtaaatatctataaattacaagctgatagttataaatcggaaattacttctaatggtggtatcgagaataaagacggcgaagtaatatctaactatgctaaacttggtgacaatgtaaaaggtttgcaaggtgtacagtttaaacgttataaagtcaagacggatatttctgttgatgaattgaaaaaattgacaacagttgaagcagcagatgcaaaagttggaacgattcttgaagaaggtgtcagtctacctcaaaaaactaatgctcaaggtttggtcgtcgatgctctggattcaaaaagtaatgtgagatacttgtatgtagaagatttaaagaattcaccttcaaacattaccaaagcttatgctgtaccgtttgtgttggaattaccagttgctaactctacaggtacaggtttcctttctgaaattaatatttaccctaaaaacgttgtaactgatgaaccaaaaacagataaagatgttaaaaaattaggtcaggacgatgcaggttatacgattggtgaagaattcaaatggttcttgaaatctacaatccctgccaatttaggtgactatgaaaaatttgaaattactgataaatttgcagatggcttgacttataaatctgttggaaaaatcaagattggttcgaaaacactgaatagagatgagcactacactattgatgaaccaacagttgataaccaaaatacattaaaaattacgtttaaaccagagaaatttaaagaaattgctgagctacttaaaggaatgacccttgttaaaaatcaagatgctcttgataaagctactgcaaatacagatgatgcggcatttttggaaattccagttgcatcaactattaatgaaaaagcagttttaggaaaagcaattgaaaatacttttgaacttcaatatgaccatactcctgataaagctgacaatccaaaaccatctaatcctccaagaaaaccagaagttcatactggtgggaaacgatttgtaaagaaagactcaacagaaacacaaacactaggtggtgctgagtttgatttgttggcttctgatgggacagcagtaaaatggacagatgctcttattaaagcgaatactaataaaaactatattgctggagaagctgttactgggcaaccaatcaaattgaaatcacatacagacggtacgtttgagattaaaggtttggcttatgcagttgatgcgaatgcagagggtacagcagtaacttacaaattaaaagaaacaaaagcaccagaaggttatgtaatccctgataaagaaatcgagtttacagtatcacaaacatcttataatacaaaaccaactgacatcacggttgatagtgctgatgcaacacctgatacaattaaaaacaacaaacgtccttcaatccctaatactggtggtattggtacggctatctttgtcgctatcggtgctgcggtgatggcttttgctgttaaggggatgaagcgtcgtacaaaagataactaaataaaaggctacttcttaagtaaccatgtttaagaaaagagaaatagccttatttctctttttgtcgtttttaaaataaaggaacatcatgaaacaaacattaaaacttatgttttcttttctgttgatgttagggactatgtttggaattagccaaactgttttagcgcaagaaactcatcagttgacgattgttcatcttgaagcaagggatattgatcgtccaaatccacagttggagattgcccctaaagaagggactccaattgaaggagtactctatcagttgtaccaattaaaatcaactgaagatggcgatttgttggcacattggaattccctaactatcacagaattgaaaaaacaggcgcagcaggtttttgaagccactactaatcaacaaggaaaggctacatttaaccaactaccagatggaatttattatggtctggcggttaaagccggtgaaaaaaatcgtaatgtctcagctttcttggttgacttgtctgaggataaagtgatttatcctaaaatcatctggtccacaggtgagttggacttgcttaaagttggtgtggatggtgataccaaaaaaccactagcaggcgttgtctttgaactttatgaaaagaatggtaggactcctattcgtgtgaaaaatggggtgcattctcaagatattgacgctgcaaaacatttagaaacagattcatcagggcatatcagaatttccgggctcatccatggggactatgtcttaaaagaaatcgagacacagtcaggatatcagatcggacaggcagagactgctgtgactattgaaaaatcaaaaacagtaacagtaacgattgaaaataaaaaagttccgacacctaaagtgccatctcgaggaggtcttattcccaaaacaggtgagcaacaggcaatggcacttgtaattattggtggtattttaattgctttagccttacgattactatcaaaacatcggaaacatcaaaataaggattagcatgggacaaaaatcaaaaatatctctagctacgaatattcgtatatggatttttcgtttaattttcttagcgggtttccttgttttggcatttcccatcgttagtcaggtcatgtactttcaagcctctcacgccaatattaatgcttttaaagaagctgttaccaagattgaccgggtggagattaatcggcgtttagaacttgcttatgcttataacgccagtatagcaggtgccaaaactaatggcgaatattcagcgcttaaagacccctactctgctgaacaaaagcaggcaggggtcgttgagtacgcccgcatgcttgaagtcaaagaacaaataggtcatgtgattattccaagaattaatcaggatatccctatttacgctggctctgctgaagaaaatcttcagaggggcgttggacatttagaggggaccagtcttccagtcggtggtgagtcaactcatgccgttctaactgcccatcgagggctaccaacggccaagctatttaccaatttagacaaggtaacagtaggtgaccgtttttacattgaacacatcggcggaaagattgcttatcaggtagaccaaatcaaagttatcgcccctgatcagttagaggatttgtacgtgattcaaggagaagatcacgtcaccctattaacttgcacaccttatatgataaatagtcatcgcctcctcgttcgaggcaagcgaattccttatgtggaaaaaacagtgcagaaagattcaaagaccttcaggcaacaacaatacctaacctatgctatgtgggtagtcgttggacttatcttgctgtcgcttctcatttggtttaaaaagacgaaacagaaaaagcggagaaagaatgaaaaagcggctagtcaaaatagtcacaataattcgaaataataaaatcagaaccctcatttttgtgatgggaagtctgattctcttatttccgattgtgagccaggtaagttactaccttgcttcgcatcaaaatattaatcaatttaagcgggaagtcgctaagattgatactaatacggttgaacgacgcatcgctttagctaatgcttacaatgagacgttatcaaggaatcccttgcttatagacccttttaccagtaagcaaaaagaaggtttgagagagtatgctcgtatgcttgaagttcatgagcaaataggtcatgtggcaatcccaagtattggggttgatattccaatttatgctggaacatccgaaactgtgcttcagaaaggtagtgggcatttggagggaaccagtcttccagtgggaggtttgtcaacccattcagtactaactgcccaccgtggcttgccaacagctaggctatttaccgacttaaataaagttaaaaaaggccagattttctatgtgacgaacatcaaagaaacacttgcctacaaagtcgtgtctatcaaagttgtggatccaacagctttaagtgaggttaagattgtcaatggtaaggattatataaccttgctgacttgcacaccttacatgatcaatagtcatcgtctcttggtaaaaggagagcgtattccttatgattctaccgaggcggaaaagcacaaagaacaaaccgtacaagattatcgtttgtcactagtgttgaagatactactagtattattaattggactcttcatcgtgataatgatgagaagatggatgcaacatcgtcaataacgatgttgtgaatggcttacttacttatcaaataggtgactaatgatgattgtgaataatggttatctagaagggagaaaaatgaaaaagagacaaaaaatatggagagggttatcagttactttactaatcctgtcccaaattccatttggtatattggtacaaggtgaaacccaagataccaatcaagcacttggaaaagtaattgttaaaaaaacgggagacaatgctacaccattaggcaaagcgacttttgtgttaaaaaatgacaatgataagtcagaaacaagtcacgaaacggtagagggttctggagaagcaacctttgaaaacataaaacctggagactacacattaagagaagaaacagcaccaattggttataaaaaaactgataaaacctggaaagttaaagttgcagataacggagcaacaataatcgagggtatggatgcagataaagcagagaaacgaaaagaagttttgaatgcccaatatccaaaatcagctatttatgaggatacaaaagaaaattacccattagttaatgtagagggttccaaagttggtgaacaatacaaagcattgaatccaataaatggaaaagatggtcgaagagagattgctgaaggttggttatcaaaaaaaattacaggggtcaatgatctcgataagaataaatataaaattgaattaactgttgagggtaaaaccactgttgaaacgaaagaacttaatcaaccactagatgtcgttgtgctattagataattcaaatagtatgaataatgaaagagccaataattctcaaagagcattaaaagctggggaagcagttgaaaagctgattgataaaattacatcaaataaagacaatagagtagctcttgtgacatatgcctcaaccatttttgatggtactgaagcgaccgtatcaaagggagttgccgatcaaaatggtaaagcgctgaatgatagtgtatcatgggattatcataaaactacttttacagcaactacacataattacagttatttaaatttaacaaatgatgctaacgaagttaatattctaaagtcaagaattccaaaggaagcggagcatataaatggggatcgcacgctctatcaatttggtgcgacatttactcaaaaagctctaatgaaagcaaatgaaattttagagacacaaagttctaatgctagaaaaaaacttatttttcacgtaactgatggtgtccctacgatgtcttatgccataaattttaatccttatatatcaacatcttaccaaaaccagtttaattcttttttaaataaaataccagatagaagtggtattctccaagaggattttataatcaatggtgatgattatcaaatagtaaaaggagatggagagagttttaaactgttttcggatagaaaagttcctgttactggaggaacgacacaagcagcttatcgagtaccgcaaaatcaactctctgtaatgagtaatgagggatatgcaattaatagtggatatatttatctctattggagagattacaactgggtctatccatttgatcctaagacaaagaaagtttctgcaacgaaacaaatcaaaactcatggtgagccaacaacattatactttaatggaaatataagacctaaaggttatgacatttttactgttgggattggtgtaaacggagatcctggtgcaactcctcttgaagctgagaaatttatgcaatcaatatcaagtaaaacagaaaattatactaatgttgatgatacaaataaaatttatgatgagctaaataaatactttaaaacaattgttgaggaaaaacattctattgttgatggaaatgtgactgatcctatgggagagatgattgaattccaattaaaaaatggtcaaagttttacacatgatgattacgttttggttggaaatgatggcagtcaattaaaaaatggtgtggctcttggtggaccaaacagtgatgggggaattttaaaagatgttacagtgacttatgataagacatctcaaaccatcaaaatcaatcatttgaacttaggaagtggacaaaaagtagttcttacctatgatgtacgtttaaaagataactatataagtaacaaattttacaatacaaataatcgtacaacgctaagtccgaagagtgaaaaagaaccaaatactattcgtgatttcccaattcccaaaattcgtgatgttcgtgagtttccggtactaaccatcagtaatcagaagaaaatgggtgaggttgaatttattaaagttaataaagacaaacattcagaatcgcttttgggagctaagtttcaacttcagatagaaaaagatttttctgggtataagcaatttgttccagagggaagtgatgttacaacaaagaatgatggtaaaatttattttaaagcacttcaagatggtaactataaattatatgaaatttcaagtccagatggctatatagaggttaaaacgaaacctgttgtgacatttacaattcaaaatggagaagttacgaacctgaaagcagatccaaatgctaataaaaatcaaatcgggtatcttgaaggaaatggtaaacatcttattaccaacactcccaaacgcccaccaggtgtttttcctaaaacagggggaattggtacaattgtctatatattagttggttctacttttatgatacttaccatttgttctttccgtcgtaaacaattgtaaggtgtcgttgaaattattaaataatagaaaatgactagttttggcctttccctattgtcagtcagattagttattatcaagcttctcatgccaatattaatgcctttaaaagaacagttacaaccattgaccgtacggagattcaacgacggttaggtctgtctaaagcctacaatgctagtatttctggaacaagtagtcagtcgactcaatctgtgctgagagattcttattctgaggagcaaaaaaggcagggtggactgaatacgctaggatgttagaagtcagagagcaggttgaccatgtgatgattccaaaaatcaatcaggatttaccaatctacgctggtccagaagaggacaatctgcaacggggagttggtcatctagaagggataagtttgccgattggaggggcttctacacatgcggtcttgagcggtcaaagaggtatgccagctgctcggttgtttgcggatttggataagatgaaaaaaggtgattatttttatgttaccaatctgaaagaaaccttggcttatcaagtggatcgtatcatggtgattgaacctagccaattggatgccgtgagcattgaagaggataaagattatgttacccttctgacctgtacaccttatatgggctctttgtcaactgtaatgggtgacttatcattaacaacgagagagaatcagcttggttctctctctttttggatgttcaaagcgatgagaattttgcttttaaaatttttaaagttgcgaaagccaaaggcttgtcgcttgatgtctttgataagcttgttggtcgcttctaatttggcattggaaagggatagctgagggcgtttgtgatgtaagttttgtacttcatgaaggtcctaaagaccattttaaaagcagaattgccagttgttacgttatcatctatgaagctaaagaattcagttgttcgcttttcttagaaatgaaagagtatgagctgataaaggtcgttataatagcggagctcatctgagaaaacttttatacctcaaagtcagtctagctttgatatcatgaagccattaggagttattccttatcttttagtggcgcgcgatccatatagtgatagatcgagatatttagatccaaaagttctatcatcctcttttggcgccttttttccagcagataatattaaggtagcttggtctaacaactccagcactttatttacaccacctattaatgcaaactacaccactcagattcaagctattgggacaacgattaagtcacaaattccggaatcgattttgacgattacggataaaaagagcaggaagttcagcattaacaagattgacgaagctaaagaaggcttagtaggtgcgaccttcaccttgtctaaacgcacaacagtagcggcagatcatcaagtacaaggagatttcattcctgtcagcaaagagacgacagtcggtcggacaacccttacctttgacaaccttaaacctggattttatgaccttaaagaaacgaaagcgccgaatgcttacgtacttgatcctaagacttatgttgtggtcgttcaaaattcaggaaaaacgacaattgtggatgaagctaacttcaaagaggctgattacccaatggctgataataccagccatgtggagtgcgtagcgttgctacaacgaagcaaagggtaaaaatcctttattttaagcactttttcaagcattttgtctttattgaaaagagtgattttaacataaaaaaggtattaaaaaacatattgacgtgaccgtttgttttgaagtggcttgcgtagacaaaaaaatagatacgtcagataaatttctggcattacgagaacatttttagagtgttctctttttttagtttacggaggaaaaatatatatggaaaaacaggattcacgagttctcatccattgggaggggaattctggggacaagctcattgaacaccaaaccagcgcaacggggtggtactaccaagtcgatcgtagctttagtcaaccaaaaggggaaccgcccagaatgatccaaaggcactagaaagtgtccgtaatgattcgatttcgggcggtgatgatgtcatgggttatgcttatagcaaatgtacttggggagttgcggcacgaattaatcagtgggactgaaactcaaaggttgaaatggtgagaagattaccattaccagttcaatgggaaatggtcaggattgggttggaacagccgaaagactagatggtgaaactgatacagttccaaaagaaggtactattctctctttttaggaaagtagttatggttcgtatataggctacggaactatatctttcgtcacattacatctacagatagtaccatgaattttgcttatatgaccaagtaaagtgaggatatactaacaaatgaaatatttattatcgtatttgtccattttatcgaaaagtttgcatattatcattatgtttgataagatgcaaatataatgatagtaggagctaaatatggatatttaaaaaatcaagagtatcctaagtgctttccattttgaaattcaaatatagctaatagttctagaacttctaattgtttttcgtcgacgatatgaattttcaatcttaactgttagaattccacctccctttggttaaagaaaaaaggtcaggtcgtttagataactttgtcaaacaagctcaagctatctaaaaatagtttgaaatgggcattactctagtttttaataagctatctgatgagcagaaggagaagttaatgcatgttgggaagtcttattttgactatcaagaaaatgctcttatcccacaattaggttttctatattctaaattaactaaaaaaattgaacttgataatcggttgtctccgactgaacaaaagttattgattaccttattattacatactaaaggtttaatcattgatatgtaagaagtaagtcagctaaccgatctttctattctaaaacttatattgttgctttagaaattttaaagagcgtggatggcttcataataaacagaaatcttaccaatttgcgaagccaaaaaatatgatatttgaagagtccaaagatctaatagatagtccagttagagaagcgttgattataagtgataaggattttcaaaaattaaaacaagagctattattttaaccgacttattttaaagacttatcatatctaggcttgcttgatgattcggaaaaatacggagactatactatttcaaggaaaagatacaaaagtttcgaatcaagtcttcaactatacatccttcaaagtcatcggctagagatttggaattatgaaccaatccctttgattactagaaaaataaatagcttggagaggctaacgtgacactggttgatccaatctcgctttatttaacactaagaatgatgaagaccctcgtattgaagaagaagttgagcagctagaa

SEQ ID NO: 302 - DNA, 13008 bp, S. agalactiae
taacacggattggaaataacatcaatcaaatttcgcgtgctatcaaccaaagccatctaatttctcaggctcagtatcactttcatcgagaagcacgttaagcccaacagcagggggggttgctctgattcggttaagtaataagcaaaatcctcaccaattttcccagtaataagaggcgttgttgaggtatagggattacctgtgccatagtcgatgatggtcacaaaatgaccattccccataaaagggccaaccaaaacttcacctgtggccgttttttgatgtcaacaccagtattttggatgtaccccttaacatgccctttggtatctgcaacagagataatatgaccaaaggaagaatcaccgatgactttaaccgtaatcttgctatcgcctttttgattagccgctaatatttgattagcaatcagggtgcgaccaagagcaactgttgaagacgacaaggtatgatgtttttcctgagccaatttaacagtctcggtgctatcgaggacataagacctgaaggcaccagaggcagaaattgatttaataattttatccataacctatgttatagcacaaagagagagtttgtatggactggattagctgaaaattttagactaaaaagtagtgccagtggattttgaaaggtaacaaaagagttttccgtttaaacgagaaggctgtttttagtcgtttcagatgaaggcaaaaggacgatgaaataattccgtaccttcatggattgctatgttactggcatgaggtctcacgatatttagtaagatattcgtttgaagatattcccacgtattttttaaaggttttaagaaaatgtgtggtgtcgtaaaaatgtaataatttcgctacttccccaatcggtacccctctttgcagtagtaattgtccctccttaatttttgcctttagaatataactttgcaaggaaatgtcagagtattttttaaaaaccgagcgtaagtgggaatctgagatatataggtagttggcaatatcagatactttgagtttggagtagaggtggttgtccacataatggagaatactattgtacatttgctgcttgtcagagatgctcttattggttaaggattctgaaaaatcaataagagctgcacagcgaattcttgaaacatcaataagatcaggagcctcttcgtttaaagccatatagtgctttaccagcgcataacttttagccacatcagtattttcctcgaaacttaattctagtaattttgttaagtaaacaacagttaagttcttttcagctcttagggcagggattgaagatgaggtaacactggatgatgggaggcgattaatttcttgctttaacagttgagtgttacccagcttaacgagatcaataatgtgattgagatggtttaaaacagtgggtaactgaaaagagtttttcttagtatgttttaggtgaagaacaatatcaggatccgcaacaatctgttctgactcttctaataaatgattgatggcttgttggcaactagcctcaaactgtgtttggaaaaaggcatcgatagacacaagaagactacgtatactggtagtaggaaaacaagggacaagctttatataggataagatttcttttttactacgatgagaaaattgttctagaaagcgactggataactgttcttgcctattgatatcagggctatagggataaaatggtccaatagcaataagatattgacagacaggaaaaattaagaatgattcttcaaaaagatcctcataaacagtgatatcttggttataagggatagctaaatgttttaaaaactgatagtaaggcaacagatagtcttcgttaccatataactgaacgagttccttgtctcgtgacatgactgaaataggtagttgagatatggtatgcaatgtttgaacatgtttaaaatcgaatgtaaccatttgatagaccgccttcattatcatttctagaatttttctttaggtttgtaaagactacaaaataaaatgatgaaaacaactatcttgtggatacactaaaaagacacgctaattagcaaactctctcttcatcatctctcaccattattatactactatttatatgacaaataaaggtgattttgttaaaaatataactttgaaaatccacatatatttttaatcttccgtctgaaaaaataaataaaaatagtaaaaataaacacgaatttaaaataagcaaattttttaagaaaatctgtgctaaactttaatagttttgtgcttaataataatcagcacttacaaagaacaaagggaaaagcgaggagagaacttttaatgaaattatcgaagaagttattgttttcggctgctgttttaacaatagtggcggggtcaactgttgaaccagtagctcagtttgcgactggaatgagtattgtaagagctgcagaagtgtcacaagaacgcccagcgaaaacaacagtaaatatctataaattacaagctgatagttataaatcggaaattacttctaatggtggtatcgagaataaagacggcgaagtaatatctaactatgctaaacttggtgacaatgtaaaaggtttgcaaggtgtacagtttaaacgttataaagtcaagacggatatttctgttgatgaattgaaaaaattgacaacagttgaagcagcagatgcaaaagttggaacgattcttgaagaaggtgtcagtctacctcaaaaaactaatgctcaaggtttggtcgtcgatgctctggattcaaaaagtaatgtgagatacttgtatgtagaagatttaaagaattcaccttcaaacattaccaaagcttatgctgtaccgtttgtgttggaattaccagttgctaactctacaggtacaggtttcctttctgaaattaatatttaccctaaaaacgttgtaactgatgaaccaaaaacagataaagatgttaaaaaattaggtcaggacgatgcaggttatacgattggtgaagaattcaaatggttcttgaaatctacaatccctgccaatttaggtgactatgaaaaatttgaaattactgataaatttgcagatggcttgacttataaatctgttggaaaaatcaagattggttcgaaaacactgaatagagatgagcactacactattgatgaaccaacagttgataaccaaaatacattaaaaattacgtttaaaccagagaaatttaaagaaattgctgagctacttaaaggaatgacccttgttaaaaatcaagatgctcttgataaagctactgcaaatacagatgatgcggcatttttggaaattccagttgcatcaactattaatgaaaaagcagttttaggaaaagcaattgaaaatacttttgaacttcaatatgaccatactcctgataaagctgacaatccaaaaccatctaatcctccaagaaaaccagaagttcatactggtgggaaacgatttgtaaagaaagactcaacagaaacacaaacactaggtggtgctgagtttgatttgttggcttctgatgggacagcagtaaaatggacagatgctcttattaaagcgaatactaataaaaactatattgctggagaagctgttactgggcaaccaatcaaattgaaatcacatacagacggtacgtttgagattaaaggtttggcttatgcagttgatgcgaatgcagagggtacagcagtaacttacaaattaaaagaaacaaaagcaccagaaggttatgtaatccctgataaagaaatcgagtttacagtatcacaaacatcttataatacaaaaccaactgacatcacggttgatagtgctgatgcaacacctgatacaattaaaaacaacaaacgtccttcaatccctaatactggtggtattggtacggctatctttgtcgctatcggtgctgcggtgatggcttttgctgttaaggggatgaagcgtcgtacaaaagataactaaataaaaggctacttcttaagtaaccatgtttaagaaaagagaaatagccttatttctctttttgtcgtttttaaaataaaggaacatcatgaaacaaacattaaaacttatgttttcttttctgttgatgttagggactatgtttggaattagccaaactgttttagcgcaagaaactcatcagttgacgattgttcatcttgaagcaagggatattgatcgtccaaatccacagttggagattgcccctaaagaagggactccaattgaaggagtactctatcagttgtaccaattaaaatcaactgaagatggcgatttgttggcacattggaattccctaactatcacagaattgaaaaaacaggcgcagcaggtttttgaagccactactaatcaacaaggaaaggctacatttaaccaactaccagatggaatttattatggtctggcggttaaagccggtgaaaaaaatcgtaatgtctcagctttcttggttgacttgtctgaggataaagtgatttatcctaaaatcatctggtccacaggtgagttggacttgcttaaagttggtgtggatggtgataccaaaaaacacactagcaggcgttgtctttgaactttatgaaaagaatggtaggactcctattcgtgtgaaaaatggggtgcattctcaagatattgacgctgcaaaacatttagaaacagattcatcagggcatatcagaatttccgggctcatccatggggactatgtcttaaaagaaatcgagacacagtcaggatatcagatcggacaggcagagactgctgtgactattgaaaaatcaaaaacagtaacagtaacgattgaaaataaaaaagttccgacacctaaagtgccatctcgaggaggtcttattcccaaaacaggtgagcaacaggcaatggcacttgtaattattggtggtattttaattgctttagccttacgattactatcaaaacatcggaaacatcaaaataaggattagcatgggacaaaaatcaaaaatatctctagctacgaatattcgtatatggatttttcgtttaattttcttagcgggtttccttgttttggcatttcccatcgttagtcaggtcatgtactttcaagcctctcacgccaatattaatgcttttaaagaagctgttaccaagattgaccgggtggagattaatcggcgtttagaacttgcttatgcttataacgccagtatagcaggtgccaaaactaatggcgaatatccagcgcttaaagacccctactctgctgaacaaaagcaggcaggggtcgttgagtacgcccgcatgcttgaagtcaaagaacaaataggtcatgtgattattccaagaattaatcaggatatccctatttacgctggctctgctgaagaaaatcttcagaggggcgttggacatttagaggggaccagtcttccagtcggtggtgagtcaactcatgccgttctaactgcccatcgagggctaccaacggccaagctatttaccaatttagacaaggtaacagtaggtgaccgtttttacattgaacacatcggcggaaagattgcttatcaggtagaccaaatcaaagttatcgcccctgatcagttagaggatttgtacgtgattcaaggagaagatcacgtcaccctattaacttgcacaccttatatgataaatagtcatcgcctcctcgttcgaggcaagcgaattccttatgtggaaaaaacagtgcagaaagattcaaagaccttcaggcaacaacaatacctaacctatgctatgtgggtagtcgttggacttatcttgctgtcgcttctcatttggtttaaaaagacgaaacagaaaaagcggagaaagaatgaaaaagcggctagtcaaaatagtcacaataattcgaaataataaaatcagaaccctcatttttgtgatgggaagtctgattctcttatttccgattgtgagccaggtaagttactaccttgcttcgcatcaaaatattaatcaatttaagcgggaagtcgctaagattgatactaatacggttgaacgacgcatcgctttagctaatgcttacaatgagacgttatcaaggaatcccttgcttatagacccttttaccagtaagcaaaaagaaggtttgagagagtatgctcgtatgcttgaagttcatgagcaaataggtcatgtggcaatcccaagtattggggttgatattccaatttatgctggaacatccgaaactgtgcttcagaaaggtagtgggcatttggagggaaccagtcttccagtgggaggtttgtcaacccattcagtactaactgcccaccgtggcttgccaacagctaggctatttaccgacttaaataaagttaaaaaaggccagattttctatgtgacgaacatcaaggaaacacttgcctacaaagtcgtgtctatcaaagttgtggatccaacagctttaagtgaggttaagattgtcaatggtaaggattatataaccttgctgacttgcacaccttacatgatcaatagtcatcgtctcttggtaaaaggagagcgtattccttatgattctaccgaggcggaaaagcacaaagaacaaaccgtacaagattatcgtttgtcactagtgttgaagatactactagtattattaattggactcttcatcgtgataatgatgagaagatggatgcaacatcgtcaataacgatgttgtgaatggcttacttacttatcaaataggtgactaatgatgattgtgaataatggttatctagaagggagaaaaatgaaaaagagacaaaaaatatggagagggttatcagttactttactaatcctgtcccaaattccatttggtatattggtacaaggtgaaacccaagataccaatcaagcacttggaaaagtaattgttaaaaaaacgggggacaatgctacaccattaggcaaagcgacttttgtgttaaaaaatgacaatgataagtcagaaacaagtcacgaaacggtagagggttctggagaagcaacctttgaaaacataaaacctggagactacacattaagagaagaaacagcaccaattggttataaaaaaactgataaaacctggaaagttaaagttgcagataacggagcaacaataatcgagggtatggatgcagataaagcagagaaacgaaaagaagttttgaatgcccaatatccaaaatcagctatttatgaggatacaaaagaaaattacccattagttaatgtagagggttccaaagttggtgaacaatacaaagcattgaatccaataaatggaaaagatggtcgaagagagattgctgaaggttggttatcaaaaaaaattacaggggtcaatgatctcgataagaataaatataaaattgaattaactgttgagggtaaaaccactgttgaaacgaaagaacttaatcaaccactagatgtcgttgtgctattagataattcaaatagtatgaataatgaaagagccaataattctcaaagagcattaaaagctggggaagcagttgaaaagctgattgataaaattacatcaaataaagacaatagagtagctcttgtgacatatgcctcaaccatttttgatggtactgaagcgaccgtatcaaagggagttgccgatcaaaatggtaaagcgctgaatgatagtgtatcatgggattatcataaaactacttttacagcaactacacataattacagttatttaaatttaacaaatgatgctaacgaagttaatattctaaagtcaagaattccaaaggaagcggagcatataaatggggatcgcacgctctatcaatttggtgcgacatttactcaaaaagctctaatgaaagcaaatgaaattttagagacacaaagttctaatgctagaaaaaaacttatttttcacgtaactgatggtgtccctacgatgtcttatgccataaattttaatccttatatatcaacatcttaccaaaaccagtttaattcttttttaaataaaataccagatagaagtggtattctccaagaggattttataatcaatggtgatgattatcaaatagtaaaaggagatggagagagttttaaactgttttcggatagaaaagttcctgttactggaggaacgacacaagcagcttatcgagtaccgcaaaatcaactctctgtaatgagtaatgagggatatgcaattaatagtggatatatttatctctattggagagattacaactgggtctatccatttgatcctaagacaaagaaagtttctgcaacgaaacaaatcaaaactcatggtgagccaacaacattatactttaatggaaatataagacctaaaggttatgacatttttactgttgggattggtgtaaacggagatcctggtgcaactcctcttgaagctgagaaatttatgcaatcaatatcaagtaaaacagaaaattatactaatgttgatgatacaaataaaatttatgatgagctaaataaatactttaaaacaattgttgaggaaaaacattctattgttgatggaaatgtgactgatcctatgggagagatgattgaattccaattaaaaaatggtcaaagttttacacatgatgattacgttttggttggaaatgatggcagtcaattaaaaaatggtgtggctcttggtggaccaaacagtgatgggggaattttaaaagatgttacagtgacttatgataagacatctcaaaccatcaaaatcaatcatttgaacttaggaagtggacaaaaagtagttcttacctatgatgtacgtttaaaagataactatataagtaacaaattttacaatacaaataatcgtacaacgctaagtccgaagagtgaaaaagaaccaaatactattcgtgatttcccaattcccaaaattcgtgatgttcgtgagtttccggtactaaccatcagtaatcagaagaaaatgggtgaggttgaatttattaaagttaataaagacaaacattcagaatcgcttttgggagctaagtttcaacttcagatagaaaaagatttttctgggtataagcaatttgttccagagggaagtgatgttacaacaaagaatgatggtaaaatttattttaaagcacttcaagatggtaactataaattatatgaaatttcaagtccagatggctatatagaggttaaaacgaaacctgttgtgacatttacaattcaaaatggagaagttacgaacctgaaagcagatccaaatgctaataaaaatcaaatcgggtatcttgaaggaaatggtaaacatcttattaccaacactcccaaacgcccaccaggtgtttttcctaaaacagggggaattggtacaattgtctatatattagttggttctacttttatgatacttaccatttgttctttccgtcgtaaacaattgtaaggtgtcgttgaaattattaaataatagaaaatgactagttttggcctttccctattgtcagtcagattagttattatcaagcttctcatgccaatattaatgcctttaaaagaacagttacaaccattgaccgtacggagattcaacgacggttaggtctggctaaagcctacaatgctagtatttctggaacaagtagtcagtcgactcaatctgtgctgagagattcttattctgaggagcaaaaaaggcagggtggactgaatacgctaggatgttagaagtcagagagcaggttgaccatgtgatgattccaaaaatcaatcaggatttaccaatctacgctggtccagaagaggacaatctgcaacggggagttggtcatctagaagggataagtttgccgattggaggggcttctacacatgcggtcttgagcggtcaaagaggtatgtcagctgctcggttgtttgcggatttggataagatgaaaaaaggtgattatttttatgttaccaatctgaaagaaaccttggcttatcaagtggatcgtatcatggtgattgaacctagccaattggatgccgtgagcattgaagaggataaagattatgttacccttctgacctgtacaccttatatgggctctttgtcaactgtaatgggtgacttatcattaacaacgagagagaatcagcttggttctctctctttttggatgttcaaagcgatgagaattttgcttttaaaatttttaaagttgcgaaagccaaaggcttgtcgcttgatgtctttgataagcttgttggtcgcttctaatttggcattggaaagggatagctgagggcgtttgtgatgtaagttttgtacttcatgaaggtcctaaagaccattttaaaagcagaattgccagttgttacgttatcatctatgaagctaaagaattcagttgttcgcttttcttagaaatgaaagagtatgagctgataaaggtcgttataatagcggagctcatctgagaaaacttttatacctcaaagtcagtctagctttgatatcatgaagccattaggagttattccttatcttttagtggcgcgcgatccatatagtgatagatcgagatatttagatccaaaagttctatcatcctcttttggcgccttttttccagcagataatattaaggtagcttggtctaacaactccagcactttatttacaccacctattaatgcaaactacaccactcagattcaagctattgggacaacgattaagtcacaaattccggaatcgattttgacggttacggataaaaagagcaggaagttcagcattaacaagattgacgaagctaaagaaggcttagtaggtgcgaccttcaccttgtctaaacgcacaacagtagcggcagatcatcaagtacaaggagatttcattcctgtcagcaaagagacgacagtcggtcggacaactcttacctttgacaaccttaaacctggattttatgaccttaaagaaacgaaagcgccgaatgcttacgtacttgatcctaagacttatgttgtggtcgttcaaaattcaggaaaaacgacaattgtggatgaagctaacttcaaagaggctgattacccaatggctgataataccagccatgtggagtgcgtagcgttgctacaacgaagcaaagggtaaaaatcctttattttaagcactttttcaagcattttgtctttattgaaaagagtgattttaacataaaaaaggtattaaaaaacatattgacgtgaccgtttgttttgaagtggcttgcgtagacaaaaaaatagatacgtcagataaatttctggcattacgagaacatttctagagtgttctctttttttagtttacggaggaaaaatatatatggaaaaacaggattcacgagttctcatccattgggaggggaattctggggacaagctcattgaacaccaaaccagcgcaacggggtggtactaccaagtcgatcgtagctttagtcaaccaaaaggggaaccgcccagaatgatccaaaggcactagaaagtgtccgtaatgattcgatttcgggcggtgatgatgtcatgggttatgcttatagcaaatgtacttggggagttgcggcacgaattaatcagtgggactgaaactcaaaggttgaaatggtgagaagattaccattaccagttcaatgggaaatggtcaggattgggttggaacagccgaaagactagatggtgaaactgatacagttccaaaagaaggtactattctctctttttaggaaagtagttatggttcgtatataggctacggaactatatctttcgtcacattacatctacagatagtaccatgaattttgcttatatgaccaagtaaagtgaggatatactaacaaatgaaatatttattatcgtatttgtccattttatcgaaaagtttgcatattatcattatgtttgataagatgcaaatataatgatagtaggagctaaatatggatatttaaaaaatcaagagtatcctaagtgctttccattttgaaattcaaatatagctaatagttctagaacttctaattgtttttcgtcgacgatatgaattttcaatcttaactgttaggattccacctccctttggttaaagaaaaaaggtcaggtcgtttagataactttgtcaaacaagctcaagctatctaaaaatagtttgaaatgggcattactctagtttttaataagctatctgatgagcagaaggagaagttaatgcatgttgggaagtcttattttgactatcaagaaaatgctcttatcccacaattaggttttctatattctaaattaactaaaaaaattgaacttgataatcggttgtctccgactgaacaaaagttattgattaccttattattacatactaaaggtttaatcattgatatgtaagaagtaagtcagctaaccgatctttctattctaaaacttatattgttgctttagaaattttaaagagcgtggatggcttcataataaacagaaatcttaccaatttgcgaagccaaaaaatatgatatttgaagagtccaaagatctaatagatagtccagttagagaagcgttgattataagtgataaggattttcaaaaattaaaacaagagctattattttaaccgacttattttaaagacttatcatatctaggcttgcttgatgattcggaaaaatacggagactatactatttcaaggaaaagatacaaaagtttcgaatcaagtcttcaactatacatccttcaaagtcatcggctagagatttggaattatgaaccaatccctttgattactagaaaaataaatagcttggagaggctaacgtgacactggttgatccaatctcgctttatttaacactaagaatgatgaagaccctcgtattgaagaagaagttgagcagctagaagataagat

SEQ ID NO: 303 - DNA, 14015 bp, S. agalactiae
ggccttgttccgatgttgatcccgataactcctggctcattaatagcctgttcgtaacgctctttaattatctctaacttagcatgggtattggtaaaattttgaaaatagactaagtatttattaacctcaggccactttctatgcatgaaatcaatttctttatagaattgttcacgaataggagcttctggagcaactatagcatcccctgaaccagaaactgtgcaaaaagtgcaccctcctctagcaactgttccgtctctgttaggacagtcaaaaccagcatctataggtaatttaaatattttttctccaaagagttctcgataataatcattaatcgcacgataacgttttttcataggataattgtatcacaattttaactaaaataacctcactactacaataaaactaaaaaagattggaacgtcagttagtcccaatcttttatttacttcactttctttaaccaatccttggctaaaaagatatacgcagttagattcaaaataccataagcaagtataaaaccagctaaaacatctgtcggaaaatgaacccctaggtaaatacgagataacccaattaaaaaaatgagcaaacccaaagtaccttggcacaacagtttccatatactcttaggcatatagtactgcaataaaataataatactcccaaatatcataaatgttcccatcgagtgcccactgggaaacgaatagccacctgcaaatactaaatgggttaaagttggtcttactctttgaaaaataagttttaaagaaagtatacatataccagagataatagcatttactgcgataaatctagcttgaggataccacttcttaaggtaacagaaagtgacgctcataatcgcaatagctatctggcttacagtattaccaatcacagtgattaacttgaaaaatcttgtagaaagatttggcaactgtcctctaacactttcttgaatagtttggtcaaatgaaattacagtgtcgggccaatatttgatgaccaatcctaaactgaaaaataagataatagcaataaatgcttgaataagtttactattttgacgagataacattagtctttttatatctttctaatattggcaaacaagccacgtaagttagatagaaaacaatcgaaattaaaattccctcaacgatattaaatggaataaccattgttaaaaggtaattgcctacaccaataaatgttctgatatcaaagttagcaaatatagcatacaaaggaatcgcaaagacatagttgagagctaccatagatacggtcaagctaactgtaccaaatagactagctttaataaaatcttttgcactctctctatttttccagaaaatagcgaaacttgctaaaaataaagctagagcaaccatattcatcggtaaaccaataaacgtttctggaccacgattagcaagtataacttttaaaagtgatcttaataagagtacaccataacttgatttcaaatcaaataaaataaaagcaactaacatcggaaggattgaaaaatcaacctttaaaaattctgctcctggtattaatggaaatgaaaccatcatcaatacaaaagataaggcagaaagaatggcgattgtcaccattttacgtgtatttgtcataaaaaaattcctccaatttaaataaattgaaagaagctccaaaggtaagcgtatgtacgcgaaaaaacctttgtcttctcccatccagactttactgtcggttgtggaatctcaccacatcagctttcgctcgcggactgatgcttcacaactgacaaataagttggaagcgattaccgccggtcgggaattacaccctgccctgaagacacctatagcataacaaaaaaaacttgcaattgcaagttttttaattactaattagtagtagtgattaaaaatcatattaataccaaattactatactgtatcgtttctttcagatttgctatttttagtttttcttaaaaagataaacaaaattcccaaaataatacaaccaagaattgtcagtcctccaccaataatcattcctgttttaggaagaaatgattgtggaaaaagcggttgtgatggtttaggatttgttggtggaggagtttctttttcgttttctacctctacttcctgtgttttattagcaactacagcaactacagcatccttcatagatatacggtaaccagttagtgcttttgcttctcgaaaaatatacttaccaggtaataaaccttcaacctcaatttctcccttatcatcagttactaatgaagtaatcccatcttgatcggtcgtaaatcgtccatttttaaagcgaactggctgattctggttatcgtataatacaaatattactccggatagccttttctttatctttccttcttttgtatatttaataagttttaatcggcctgtttcaacttttcgcttaggatttatctgtaattgatttgataacttatcatctggtaattcaatataaaaaggtactattgttgaaacgctttgatcagctttataagcacgaccaaagtacgaaccatttgggagtgctatctttgtctgaccattagtatcagtaggagaagtcaagatactcttatacttctggttcaattcgctatctgtcatttggctcaataaatcaacttttaagttgtcagtcacagtccataaacgataagaaatcccctcctctgtagtatttggctgaagtcctatctgtgtgattgttagttgattaggggtatcagcatttacactggctaccgaaaaaaacgctaattgtaccaatcctaaaaagcaacatagtagaagtcctaaactttttctaatctttttcatttttgatttccctttctctttctctctttaaattttcgttttaaatataatagtaaagcgactaatataagaataactaggattgataagaggaaataaagtttatagtgtgtttgcaattctttcattaaatagttcttttctttaacaggaggtacatacttgattcgatgccctctaactagtaaacgatgtgaattaatcgaataaggtgtacatgttagcaaagtcgcataatccttacctttaacaaccaataatttagaaaaattatctggctttacaacacttatttgatcaaccttataggctaaaacttctttgatattatgaatataaaaaatttttccttttttaagtttatctaaatctgtaaataacttagctttaggtaagccgcgatgagctgtgataacagtatgtgaactttttccaccaattggcaaggaggttccttcaaggtgtcctgctcctttttcaagaacactactggtagtccccgcatagataggtaatttttgcttgatagacggtatatcaatatatccaatcatttcagcaatctcaagcatgtgggcgtattcagcaataccttttttttctttttcagtatagggatctgataggcggcttgggtccagtgttctattataagcttttgctaactcaaatcgtctattaatctctttagtatttaatttttgggtttgattatcaaagttagttacttgattattagctttaatattatagtaccaatttgaaataaaaggatatgaggttatcaaaagaccaactaagaacaatagtatcaagcctacattcatccatcgatttaaaacgaccgatttcttaaggtttttctgaaattttcctcccattatgattcaattccttttctaacacttgctaaacgatttttttgacgttgacgttttattaaccaaagtaaccaagcaataataactaaagatatatagaaaagatatctataaatcgtgtttaaatgaccgtcttttattaatttttcatcaataggacctttataagggatacgatgtccccttactaaaagtctgtgtgtattgaccataatcggggtgcaagtcaataaggttgcataatcatgtccaggaacaaccaacaaatctgaaaagttatcgggtgtaacgacttttatctgatctacttgatatgctatcgtttcttttatgttttgaatataaaacttatctcctttttttaactttttaaggttagaaaagagttctttatctggaattcctgaatgcgctgttataacagtatgtgtactattgccctcaattggaagagaggtaccttctaaatgccctgctcctttagatagaacttcttgacttgaacctgcaaatatagggagtttttgacctatcttaggaactgaaattgtgccgattttttcacttacctctaacatacgggcgtactctgctacccccttttgaattcgttttttctcataaggatcttcaagatggacattatttaaagaatcattataagcttgtgctagagccatacgtcgattgatttctttctgactaagttttttagcagctctctcaaaatcctgtgtttgattattagattctatcgtatagtaaaaacgtgataccactggatacaataaaatagatagacctattagaaaaagaatgataaaaggaagatttgacttcttcttttttgtttttttgatgatttttttagtcttcacgtcatctcctaaataatggctcttgcttatgatctaagagtacttctactgaaatacccttagatcataagcacagctttaactgtgcttatacatcatcaaagactagccttaagcttcctctgattgacgtcttttcatgataactactgctccaagcataatgcttaaaccaataattgtgaaaagaattgtaccaataccacctgtttgtgggattgttacctttttattttctactcgttgcgcatctttttttttgctgctagcagcgtagtcaatgttacctgaaccttttctgtatgacctttgattaacttcaaacttaacatcacctgccaatttagcataacctgctggagcttgtgtttcttcaaggttgtaagtaccttctgcaagacctgtaacttcaaattgaccttgatcgtttgaagtcaatttaacaactttagcagctttttatctgttacccactcataagctgtacgagcttcaatgaaggctgcattgtaagcttcttgtttagttttgatagttgcttttgctgttttacctttttgacctttttgttcttctgcagacaacttgttataagctgcgatagcttcatctaaagctattttagtagtagctaaagctgttttttgagctgcttttgcttcatctgctttaagtgcaaggtatttacctgctgagtttttaacaacgaattgtgcacctgccaagcgttcagtttcaggttcatttgttttgacaaatttcttaccatgagtcacaacttttggttcagttgggttgattggtgttgggttatctgaatctttggtattggtgatggttacattaccattttcaagagttattgcagtaccgtaaccagtaacacgttctgagatcatgtatgttttattatcatccagaccagtgaatttacctgcgaagttaccagatactgtaaatttgataccattaccaatgtcgattgtaccattaggtgtttttgtcaatgatactgaagcaacagctgtatcattatctttaaatgtgtaaacaacgtttacattatctggttcactaccttctgcccaagttttagtaactgttatttcaccctttgatggtgtaactggtagttctttcatttctttacctggtttgttaccatagtccaatttgatatcattggtttctggattttcaacaatagctggaccgttaacagtagctctataagtcaatgtgaattcaacatcttttgtttttgctgctttttccacttttgccaaacctttagctgtgaattttaatgtgaaaccacggtcatcagttccaagtttgtagtctgtatccttaacaaaagttcctgccgatgcttcaaggttaacagtgttacccattgtcaaaccatttgacatgctatctgtccaaaccaagtttttgtatttagaacctttgtgaatttttgttttaacttcgtaaggtataactttaccgatttcagcagtagcagttgctttgtctttttgatagttagcataatctgcgccagctgtcaaaagtctattaacactgtcaattgtcaagttgtttgttttagcaaagtttttatctatttgtggtttttcttcagtgttctttggataaacgtgagcatcttcaacaacaccatcttcgtttaccaatggaagagtgattttaactggaactgcttttgaatcagccaggatggaaccattattgttgtaagtagatttttctttcaattcaacgatttggtactttccttttaattttgtagtgttaaaaacaatacctttgtctgttgtcaatcctttaagaacaccatcttcattaatttctgttggttttaatttgttacttccttaccactttccgtaatgtattttgttttatcttcattcataacagcaaagaaagcaccttcgatttctttagatccttcgccaaagtaacctgtaaggtcagtaatttgtttacctatgtagtcttttccattcataccttttgttcctgggaagttacttttgtcaaaattagcttgtgtttggacaatcttgtgcaaggtcactgtattagttgttgcttcatccgcaaacgctggtgcaactgagaacaatgacgttaaagtcagtaacaatgccgagaacattgcaaaatatttgttgattcttttcatttctatctccttcttattttagttaatcaacatgattaataatatgcggattttaatacaccgcagcaccactcccttcaagtcatggaattttagttaattaattaagaatactaaagcgcataatttttaatcttttttgatggacatatcactagatttcttataccttttccaaatataaattccacctgcaatagacatcatagctccacctattaaaatgaaagatagaattcctttcccacctgtcataggaataattccttttggtggaatatgcgtgttggtaattaaatgcttgtcaccttcctcatgatattcagaaatctgtttattaacagctattatattttttatcgatcctttaaccacttcaaaagttaaaattggtttattagtaattttttgataatcctccggcgaaactgcttctattaactgatatttgccatctttcaaatctttgtaagaaattttgccgttttctcccgtcactacttttgaattattattttttattggtaaataaagtttataatcttcattaaattcttgaagttcaaacgtagctcctttgagaagcaacttattattatctttatcaacttttataaattcaatttcacctaacttcttctcgtttttaatcgttattgtaggatattctctcacatcacgaattttagggattggaaaatctctaagtgtattaggatcctctgacttaggattcaatgttgttctaccattagtgtcatagaatttgttacttataaaactgtcatctagtttcacatcatatgtgagtgttactttttgaccttctcctaaattcaaacctctaacatagagtttatttccgatgtattctaatttaacccccttaagtattccaccatcattattaggcccaccagttgcaataccatccttcattacacttccatcatttccctgtaaagtataatcacttggctgtaatgtttgtccattaccaagctgtaaattgattttatcacccataggatcttcgatagttccattaacaattgagttttcttttgttaaaatcgtttcaaattgttgctgaattttagataaaatttcattgttagatgtatcggctgaagttacgataggggtgtagtactcaggtttggaagagaacgacctcattagttctgtgatttctccatctgaaagtttaaaagcttcctctttcaatttttgaaaagtaccatcttgatttttcttatactcctcattataaacttgtctaaaaccagatatatcgataccaaaattaaaaatgtcataatttttctgttttaaactatttatataaagtttggttggtgttccatgttctttcactggtccatttcgataaattgtacctttagggtaattaagatttaaatctaaataatgaagtttttgtaagtttccagagattatctgtgtttgataactatctaagggaaacaaaaagtaactctccccatttccttttatatcctcgggcttatcagtaagtagaaaattacttttatttagatatccattttttttcatttgttcaaattggctttcatatgatgcacccagtttaaaattattaatagcatatgatctcgtaggaacaccatcagttacatgaacaataattttttgactatttcgatttacttgactcaaaatatcatctgcctccatgaaggctttcatagtaaatgtttctcctactttactaagatagtactccttttgttgctctggagttaatccattggtagtagatccccacttagctttaggagcttctgtcggaatcctttttataatctcttcagcattatttgttaattgtttatgactataattctctgtctgaattgtgaacttagtttgaaggccataatatttatcatcttctttaaatccttttacgacatctacactcctaccatcaaaaatatctgaaccataggtaactaatgcaaccctattatcactgtttgctcctaaaatatcttttactgcggtcccaagagcttcggcagctttcttggctttattatgcctttgaaaatttgggccatcgttattcattgagttagaattatcgagtacgaagacaacatctaacggcttttgtttgtccactggttttactatggtttttccactgacagttaactcaattttatatttattatgagctaaatcacctacttctgaaatacgtttagataatgttccctctggaatttctcttatatgctcaccttcacttgaatatgggttaactgcttttgcctctgactttccatttggaactgaacctttaacatgctcaagtttataagattcctttgtatcttcataaattcctgtggggggatactgcttatctagttcttcctgattttgtccaattgtggaatttttatcaccactattttgtatcgtagtttttccattactctcaaccttaacttgccaagtctggttagtctttttataaccttcgggcgctgtttcttctgataaagtataatctccaggtatgagattatcaaaagtagcttcacctgttagctcagcagttactttttctattttactttctggatgagcagtagtttttaaaacaaaggtagcttttgaaagtggtttgttctggtcatctgtctttttaacaactaactttcctttagcaccattttccggtacggtactttcccctaaaacattggtattaagcggtatttgcgacaaacaaaaaagacttaacgtcaatattttagaaaatttttggtattttctcattttacaactcctattgtgccgaaatgtcgtttctaaatctaagatcagatacagaatatcctagaatatacaaactatcacttattatgatatcaataatttcttattataaggtatggaattttaatgttttttcccaatttttgaataatttttctttttatttgataatcttattttttattatcttagaaatatttcaatgagcttaagtagttgatttttctttttttatgttttaaaatattgcttaaaaataatgtttgagagagtttactgaattgattgaaaattatttagaaaaagacatccttaatcaaataaaacttctaactttatgctatgattactacccttccattactctagacaaatcatgtcatcaacttggtttatctgaactacttattaggaaatattgtcatgatttaacaactttatttaacagtcaactctctctgaatatcgaaaagagtacaatagtctaccaatctaatggtgtaactagagaacaagctttcaaatatatttatcatcaatcacacgttttacaacttttaaaatttttgatcacgaatgattcaggcaggttacctttaacttactttagtgaaaaatttggactatcttgtgcaactgcttatcgcatacgaaaacatattagtccattactagaaaaacttggatttcagattgtcaaaaatactattaccggtgacgagtatcgaattcgctatttaatcgcatttttaaatgctcaatttggtatagaagtttatcccatgtctaagatggataaattgctcatcaaacgattgttattagaacactcaactacttttactgcttctcattacttcccaaatacatttattttctttgatacattgttgtctctatcatggaaacgtattaattataatgtagttgtcccttactcatcccttttcactgaactacaaaatatatttatctatgatacattacaatattgtgtcaaaaatgttattatagattcctttaaaattaatttaaaaaaagacgatatagactatatttttcttgcttaccttacttcccataactctttttctaatccaaattggactgagaagcgtatcgataatgtaatagctattttcgaaaattatcccaaattccaaaaattattacagccactcaaagatgctcttcccttatctggctcctatcatgatgagttggtaaaagttgctatcttttttttccgaacatttattttaggattaaatcaattaatccctgaaacaatttcatttccttcatggaactatcatagacatgataaattaactactattctccgaccgataattacaaattggttaagtaaaattggagaatacacgtttaaagaacaacattttcttctcctttgtactcatctagaaagaatcatcaaaaatcatattcctccgatacagatagccgtactaactacagactttattaataaccaaattttaacagaatgcttattacagagattttcttctaaaaagattcatttccacccttactatttattaactgatgatctttccaatattactaatcttaatccagacattattattaccaataaaaagctttctccctttatcaaacatgagatttcttcagagagtttaattacatatattgatctgattaatacttcagaccaaatcaatcaaatccaaaaaattatttcatcaatacaggaagaaaaatattgcaaactttttgcaaaaactaatgaaataactaatcgtagctcctataactcttaaaaattaacattaaaaagctagagcattgtgtaatgctctagctttttaatgttaatttttttgaataatataatccaacttttcaactgttttttcccatgtgaaatgttctttaattcttttagcaatattctgttgtagtttctctcttaatgccttatcttttactaataaatcaagagattcatggagtgactgagtattttcttccatgatgattcctaactcagggctatcaataacttcaactgttccaccgcgatctgttgcaataatagcacttgaaagtagaccagcttctaaaatagaggttggtaatccctctggatacattgaagggtaaacaaagatatcagtctgtgccattaaagacatagtctgttcaaagtttaatttccccaaaaagttaatctgtttggactgatatttctctttcaaatgtgctaattcaggtccgtctcctgcaatctgtaaataaacattttcagagtactgtgacatcgaaaatgcttctaagagcaattcaatgcctttttctttaataattctaccagcataagtgatgaaaatatcatcagcagatttttcaaggtaagccgtaccagcaaaatcagagcctagactttcagataccgaattataaataactcctttagcttctatattaaaatgttttaaccattcaacgcttctcttggataccgcataaaaatctggacgataatgcttaacacgcgctgtgagaagatgttcatagatagctccaaagaaatctaaaaaacgattattgacagaaaaatgacttgacccatggtctaaaacaatactaggtaaatggtgattctttgcaaaagatagcccttctagcgttgttaactgaaaacgtgtattacaaatcacaaaatcaatattttcatctgaaacatatttcatcagcgtgttgtattctcgatttttgttaataataggatagcgctgcttgacaatatttttggtcggtaaacggtaaatttttctacccttgtcttcatctataatcggtaaatcaccatgattagttgttacaataacaacacggtagccacgcttaaccaaatctgctgtcattttatctgtataacgttcaatacctccgaggaagggtagataatatcctgagaaaacagcaactgtttttaccttattttccatatttatccactttcatcaataagccatcttttaagcctttaatcatagcaactatttttttgctcttttgctcttctgctaccaacactcgaacaaattcatttcgcataaatactaaatatttgtatcgcttcttcttaccatatttttttataatatagatcgcattgcgtatcatgtaatattttcgaaatggtgaatgattcaatacatgaaaaacatggccaaattttttaactcgtgaagagtgtccaatttcgtgtaacagaccaataaaattaacctgataagtcttatatcccatctctgacagacgataattcatttcagagtcaacaaaatcaataaacatctcttctgcaaagccagatgtttcttcgaaaacgctcgttttcattaaagcagccgaagtaatacactcttcaatttctttatagtcaaattcttgcatcactaaattttcacggttcatatcttgatacaaacaagataacataccgaccttaggtaaatgaaggtaattttcataattatctatcaaatcacctaggacaaccgaatcttgatctaaagtcaagaaccaatcaaattcttgtgctactgcaaattgaccgatacagttcaaagcatatgcaattcctttattttctgttaaataatcaacagttaggtgcccctcttcattataatcggctactaattgagaaatttcttccttatttttcgagccattatctacgatgtagatatggcttacttgaggataaattgctcgaatgttctgatctaagcgttcaatattggggttaaaggtgacaatacccgctaaatatttcatgttctatgctcttttctaaaatctctaaataactgaatgactggtgctttggttataaaaacgataccgacatagatagttactgctactaaactttgaatgacataatttaccaatgatactgacatttgagtattgatataatagagtacagctccactaagagtagcagcaattaaatagcgcagcattcctcttgttaattctttaaaagtaaatacatctcttaaagagatagcttgatatagggagacaataaattcagtaataactgtagagataatagctcccatagcacctaaaattggtattaaaagtatattaagcacaacatttgccacaagtccaataactgcagacattgtgtaagcttttgtacgtcttgaagccagtagatactgtgtccctaaagcgttaccataagaaatgcaaatgatcatcaaagactcaacaccgacaacttcataccctttcccaaaaaagaagacgcaaa

SEQ ID NO: 304 - DNA, 14000 bp, S. agalactiae
ggccttgttccgatgttgattccgataactcctggctcattaatagcctgttcgtaacgctctttaattatctctaacttagcatgggtattggtaaaattttgaaaatagactaagtatttattaacctcaggccactttctatgcatgaaatcaatttctttatagaattgttcacgaataggagcttctggagcaactatagcatcccctgaaccagaaactgtgcaaaaagtgcaccctcctctagcaactgttccgtctctgttaggacagtcaaaaccagcatctataggtaatttaaatattttttctccaaagagttctcgataataatcattaatcgcacgataacgttttttcataggataattgtatcacaattttaactaaaataacctcactactacaataaaactaaaaaagattggaacgtcagttagtcccaatcttttatttacttcactttctttaaccaatccttggctaaaaagatatacgcagttagattcaaaataccataagcaagtataaaaccagctaaaacatctgtcggaaaatgaacccctaggtaaatacgagataacccaattaaaaaaatgagcaaacccaaagtaccttggcacaacagtttccatatactcttaggcatatagtactgcaataaaataataatactcccaaatatcataaatgttcccatcgagtgcccactgggaaacgaatagccacctgcaaatactaaatgggttaaagttggtcttactctttgaaaaataagttttaaagaaagtatacatataccagagataatagcatttactgcgataaatctagcttgaggataccacttcttaaggtaacagaaagtgacgctcataatcgcaatagctatctggcttacagtattaccaatcacagtgattaacttgaaaaatcttgtagaaagatttggcaactgtcctctaacactttcttgaatagtttggtcaaatgaaattacagtgtcgggccaatatttgatgaccaatcctaaactgaaaaataagataatagcaataaatgcttgaataagtttactattttgacgagataacattagtctttttatatctttctaatattggcaaacaagccacgtaagttagatagaaaacaatcgaaattaaaattccctcaacgatattaaatggaataaccattgttaaaaggtaattgcctacaccaataaatgttctgatatcaaagttagcaaatatagcatacaaaggaatcgcaaagacatagttgagagctaccatagatacggtcaagctaactgtaccaaatagactagctttaataaaatcttttgcactctctctatttttccagaaaatagcgaaacttgctaaaaataaagctagagcaaccatattcatcggtaaaccaataaacgtttctggaccacgattagcaagtataacttttaaaagtgatcttaataagagtacaccataacttgatttcaaatcaaataaaataaaagcaactaacatcggaaggattgaaaaatcaacctttaaaaattctgctcctggtattaatggaaatgaaaccatcatcaatacaaaagataaggcagaaagaatggcgattgtcaccattttacgtgtatttgtcataaaaaaattcctccaatttaaataaattgaaagaagctccaaaggtaagcgtatgtacgcgaaaaaacctttgtcttctcccatccagactttactgtcggttgtggaatctcaccacatcagctttcgctcgcggactgatgcttcacaactgacaaataagttggaagcgattaccgccggtcgggaattacaccctgccctgaagacacctatagcataacaaaaaaaacttgcaattgcaagttttttaattactaattagtagtagtgattaaaaatcatattaataccaaattactatactgtatcgtttctttcagatttgctatttttagtttttcttaaaaagataaacaaaattcccaaaataatacaaccaagaattgtcagtcctccaccaataatcattcctgttttaggaagaaatgattgtggaaaaagcggttgtgatggtttaggatttgttggtggaggagtttctttttcgttttctacctctacttcctgtgttttattagcaactacagcaactacagcatccttcatagatatacggtaaccagttagtgcttttgcttctcgaaaaatatacttaccaggtaataaaccttcaacctcaatttctcccttatcatcagttactaatgaagtaatcccatcttgatcggtcgtaaatcgtccatttttaaagcgaactggctgattctggttatcgtataatacaaatattactccggatagccttttctttatctttccttcttttgtatatttaataagttttaatcggcctgtttcaacttttcgcttaggatttatctgtaattgatttgataacttatcatctggtaattcaatataaaaaggtactattgttgaaacgctttgatcagctttataagcacgaccaaagtacgaaccatttgggagtgctatctttgtctgaccattagtatcagtaggagaagtcaagatactcttatacttctggttcaattcgctatctgtcatttggctcaataaatcaacttttaagttgtcagtcacagtccataaacgataagaaatcccctcctctgtagtatttggctgaagtcctatctgtgtgattgttagttgattaggggtatcagcatttacactggctaccgaaaaaaacgctaattgtaccaatcctaaaaagcaacatagtagaagtcctaaactttttctaatctttttcatttttgatttccctttctctttctctctttaaattttcgttttaaatataatagtaaagcgactaatataagaataactaggattgataagaggaaataaagtttatagtgtgtttgcaattctttcattaaatagttcttttctttaacaggaggtacatacttgattcgatgccctctaactagtaaacgatgtgaattaatcgaataaggtgtacatgttagcaaagtcgcataatccttacctttaacaaccaataatttagaaaaattatctggctttacaacacttatttgatcaaccttataggctaaaacttctttgatattatgaatataaaaaatttttccttttttaagtttatctaaatctgtaaataacttagctttaggtaagccgcgatgagctgtgataacagtatgtgaactttttccaccaattggcaaggaggttccttcaaggtgtcctgctcctttttcaagaacactactggtagtccccgcatagataggtaatttttgcttgatagacggtatatcaatatatccaatcatttcagcaatctcaagcatgtgggcgtattcagcaataccttttttttctttttcagtatagggatctgataggcggcttgggtccagtgttctattataagcttttgctaactcaaatcgtctattaatctctttagtatttaatttttgggtttgattatcaaagttagttacttgattattagctttaatattatagtaccaatttgaaataaaaggatatgaggttatcaaaagaccaactaagaacaatagtatcaagcctacattcatccatcgatttaaaacgaccgatttcttaaggtttttctgaaattttcctcccattatgattcaattccttttctaacacttgctaaacgatttttttgacgttgacgttttattaaccaaagtaaccaagcaataataactaaagatatatagaatagatatctataaatcgtgtttaaatgaccgtcttttattaatttttcatcaataggacctttataagggatacgatgtccccttactaaaagtctgtgtgtattgatcataatcggggtgcaagtcaataaggttgcataatcatgtccaggaacaaccaacaaatctgaaaagttatcgggtgtaacgacttttatctgatctacttgatatgctatcgtttcttttatgttttgaatataaaacttatctcctttttttaactttttaaggttagaaaagagttctttatctggaattcctgaatgcgctgttataacagtatgtgtactattgcccccaattggaagagaggtaccttctaaatgccctgctcctttagatagaacttcttgacttgaacctgcaaatatagggagtttttgacctatcttaggaactgaaattgttccgattttttcacttacctctaacatacgggcgtactctgctacccccttttgaattcgttttttctcataaggatcttcaagatggacattatttaaagaatcattataagcttgtgctagagccatacgtcgattgatttctttctgactaagttttttagcagctctctcaaaatcctgtgtttgattattagattctatcgtatagtaaaaacgtgataccactggatacaataaaatagatagacctattagaaaaagaatgataaaaggaagatttgacttcttctttttttttgtttttttgatgatttttttagtcttcacgtcatctcctagataatggctcttgcttatgatctaagagtacttctactgaaatacccttagatcataagcacagctttaactgcgcttatacatcatcaaagactagccttaagcttcctttgattggcgtcttttcatgataactactgctccaagcataatgcttaaaccaataattgtgaaaagaattgtaccaataccacctgtttgtgggattgttacctttttattttctacacgtgtcgcatctttttggttgctgttagcaacgtagtcaatgttaccacctgttatgtatgacccttgattaactacaaacttaatattacctgccaacttagcaaatcctgctggagcaagtgtttcttcaaggttgtaagtaccgtctgcaagacctgtaacttcaaattgaccttgatcgtttgaagtgtaggtaatggctctagccttatctgttatccactcataagctgtacgagcctcaatgaaggctgcatcgtaatctgcttgtttagttttgataagttcttttgcagtaattcctttttcacctttttggtctgttgcagacaacttgttataagcagcgatagcttcatctaaagctattttcttagcagctaaagttttttgaccttctgattgatctgctttaagagcaaggtatttacctgctgagtttttcacaacgaattgtgcaccagccaaacggtcaccttgttcattagttttgacaaatttcttaccatgagtttcaacttttggttcagttgggttcaatggtgttgggttatcagaatctttggtattggtaatggttactttaccattttctagatttattgcacttccgtaaccagaaacacgttctgagatcatgtatgatttgttttctagaccagtgaatttacccgagaagttaccagatacttcaaatttgataccatttccaaggtcgattgtacctttagatgtttttgtcaatgatactgaagcaacagttttatctttatctttcaatgtgtaaacaacgtttacaccatcaggtgcaattccgtcagaccaagttttagcaactgttacttcaccctttgaaggtgtaacaggaagttcagtcaagtctttacctggtttgttaccatacgacaatttgatatcattggattctggattatcaataattgcttgaccattaacagtagcactataagtcaatgtaaattcaatatcagctgttttagctgctttttccaatttgcccaatccatcagctgtgaattttaatgtgaaaccacgggcatcaatgctaagttcatagtctgtatccttagcaaaagtttctgtagttcctgaagctttaaggctaacagttgaacccattgtcaaaccatttgacattatatctgtccaaaccaagttttcgtatttagaacctttgtgaatttttgttttaacttcataaggaacaactttaccgatttcagcagtagcagttgctttgtcacgtgcataattaccataatttgcgccagctgtcaaaagtctattaacatctgtcaatgctgtcaaatcgtttgttttagcaaagtttttatcaatttctggtttttcttcagtgttctttggataaacatgggcatcagcaacaacaccatcttcatttaccaatggaagagtgatgttaactggaaccgcttttgaagcagccaggagggaaccattattgttgtaagtagattttgatttaacttcaacaattttaaactcgcctttcaatcctttggtgttgaaaacaagtccagtatctccctctggtgtcaatccagacacggcctcatcaatatttactgttatttcaggagtaccatctttattaattaaggctggtgttaatttgttaccttcttttgccttaacatattgcactttaccacttttatcttctttcaaagctaaagcaaagaacgcaccttcgatttctttagatccctcgccaaagtaaccagcaaggtcagaaatagctccacctttgtagtcttttccgttaagacctgtagttcctgggaagttacttttgttaagatttgattcggtttgcaaaatcttgtgcaaagtcactgtattagttgttgcttcatccgcaaacgctggtgcaactgagagcaatgacgttaaagtcagtaacaatgccgagaacattgcaaaatatttgttgattcttttcatttctatctccttcttattttagttaatcaacatgattaataatatgcggattttaatacaccgcagcaccactcccttcaagtcatggaattttagttaattaattaagaatactaaagcgcataatttttaatcttttttgatggacatatcactagatttcttataccttttccaaatataaattccacctgcaatagacatcatagctccacctattaaaatgaaagatagaattcctttcccacctgtcataggaataattccttttggtggaatatgcgtgttggtaattaaatgcttgtcaccttcctcatgatattcagaaatctgtttattaacagctattatattttttatcgatcctttaaccacttcaaaagttaaaattggtttattagtaattttttgataatcctccggcgaaactgcttctattaactgatatttgccatctttcaaatctttgtaagaaattttgccgttttctcccgtcactacttttgaattattattttttattggtaaataaagtttataatcttcattaaattcttgaagttcaaacgtagctcctttgagaagcaacttattattatctttatcaacttttataaattcaatttcacctaacttcttctcgtttttaatcgttattgtaggatattctctcacatcacgaattttagggattggaaaatctctaagtgtattaggatcctctgacttaggattcaatgttgttctaccattagtgtcatagaatttgttacttataaaactgtcatctagtttcacatcatatgtgagtgttactttttgaccttctcctaaattcaaacctctaacatagagtttatttccgatgtattctaatttaacccccttaagtattccaccatcattattaggcccaccagttgcaataccatccttcattacacttccatcatttccctgtaaagtataatcacttggctgtaatgtttgtccattaccaagctgtaaattgattttatcacccataggatcttcgatagttccattaacaattgagttttcttttgttaaaatcgtttcaaattgttgctgaattttagataaaatttcattgttagatgtatcggctgaagttacgataggggtgtagtactcaggtttggaagagaacgacctcattagttctgtgatttctccatctgaaagtttaaaagcttcctctttcaatttttgaaaagtaccatcttgatttttcttatactcctcattataaacttgtctaaaaccagatatatcgataccaaaattaaaaatgtcataatttttctgttttaaactatttatataaagtttggttggtgttccatgttctttcactggtccatttcgataaattgtacctttagggtaattaagatttaaatctaaataatgaagtttttgtaagtttccagagattatctgtgtttgataactatctaagggaaacaaaaagtaactctccccatttccttttatatcctcgggcttatcagtaagtagaaaattacttttatttagatatccattttttttcatttgttcaaattggctttcatatgatgcacccagtttaaaattattaatagcatatgatctcgtaggaacaccatcagttacatgaacaataattttttgactatttcgatttacttgactcaaaatatcatctgcctccatgaaggctttcatagtaaatgtttctcctactttactaagatagtactccttttgttgctctggagttaatccattggtagtagatccccacttagctttaggagcttctgtcggaatcctttttataatctcttcagcattatttgttaattgtttatgactataattctctgtctgaattgtgaacttagtttgaaggccataatatttatcatcttctttaaatccttttacgacatctacactcctaccatcaaaaatatctgaaccataggtaactaatgcaaccctattatcactgtttgctcctaaaatatcttttactgcggtcccaagagcttcggcagctttcttggctttattatgcctttgaaaatttgggccatcgttattcattgagttagaattatcgagtacgaagacaacatctaacggcttttgtttgtccactggttttactatggtttttccactgacagttaactcaattttatatttattatgagctaaatcacctacttctgaaatacgtttagataatgttccctctggaatttctcttatatgctcaccttcacttgaatatgggttaactgcttttgcctctgactttccatttggaactgaacctttaacatgctcaagtttataagattcctttgtatcttcataaattcctgtggggggatactgcttatctagttcttcctgattttgtccaattgtggaatttttatcaccactattttgtatcgtagtttttccattactctcaaccttaacttgccaagtctggttagtctttttataaccttcgggcgctgtttcttctgataaagtataatctccaggtatgagattatcaaaagtagcttcacctgttagctcagcagttactttttctattttactttctggatgagcagtagtttttaaaacaaaggtagcttttgaaagtggtttgttctggtcatctgtctttttaacaactaactttcctttagcaccattttccggtacggtactttcccctaaaacattggtattaagcggtatttgcgacaaacaaaaaagacttaacgtcaatattttagaaaatttttggtattttctcattttacaactcctattgtgccgaaatgtcgtttctaaatctaagatcagatacagaatatcctagaatatacaaactatcacttattatgatatcaataatttcttattataaggtatggaattttaatgttttttcccaatttttgaataatttttctttttatttgataatcttattttttattatcttagaaatatttcaatgagcttaagtagttgatttttctttttttatgttttaaaatattgcttaaaaataatgtttgagagagtttactgaattgattgaaaattatttagaaaaagacatccttaatcaaataaaacttctaactttatgctatgattactacccttccattactctagacaaatcatgtcatcaacttggtttatctgaactacttattaggaaatattgtcatgatttaacaactttatttaacagtcaactctctctgaatatcgaaaagagtacaatagtctaccaatctaatggtgtaactagagaacaagctttcaaatatatttatcatcaatcacacgttttacaacttttaaaatttttgatcacgaatgattcaggcaggttacctttaacttactttagtgaaaaatttggactatcttgtgcaactgcttatcgcatacgaaaacatattagtccattactagaaaaacttggatttcagattgtcaaaaatactattaccggtgacgagtatcgaattcgctatttaatcgcatttttaaatgctcaatttggtatagaagtttatcccatgtctaagatggataaattgctcatcaaacgattgttattagaacactcaactacttttactgcttctcattacttcccaaatacatttattttctttgatacattgttgtctctatcatggaaacgtattaattataatgtagttgtcccttactcatcccttttcactgaactacaaaatatatttatctatgatacattacaatattgtgtcaaaaatgttattatagattcctttaaaattaatttaaaaaaagacgatatagactatatttttcttgcttaccttacttcccataactctttttctaatccaaattggactgagaagcgtatcgataatgtaatagctattttcgaaaattatcccaaattccaaaaattattacagccactcaaagatgctcttcccttatctggctcctatcatgatgagttggtaaaagttgctatctttttttccgaacatttattttaggattaaatcaattaatccctgaaacaatttcatttccttcatggaactatcatagacatgataaattaactactattctccgaccgataattacaaattggttaagtaaaattggagaatacacgtttaaagaacaacattttcttctcctttgtactcatctagaaagaatcatcaaaaatcatattcctccgatacagatagccgtactaactacagactttattaataaccaaattttaacagaatgcttattacagagattttcttctaaaaagattcatttccacccttactatttattaactgatgatctttccaatattactaatcttaatccagacattattattaccaataaaaagctttctccctttatcaaacatgagatttcttcagagagtttaattacatatattgatctgattaatacttcagaccaaatcaatcaaatccaaaaaattatttcatcaatacaggaagaaaaatattgcaaactttttgcaaaaactaatgaaataactaatcgtagctcctataactcttaaaaattaacattaaaaagctagagcattgtgtaatgctctagctttttaatgttaatttttttgaataatataatccaacttttcaactgttttttcccatgtgaaatgttctttaattcttttagcaatattctgttgtagtttctctcttaatgccttatcttttactaataaatcaagagattcatggagtgactgagtattttcttccatgatgattcctaactcagggctatcaataacttcaactgttccaccgcgatctgttgcaataatagcacttgaaagtagaccagcttctaaaatagaggttggtaatccctctggatacattgaagggtaaacaaagatatcagtctgtgccattaaagacatagtctgttcaaagtttaatttccccaaaaagttaatctgtttggactgatatttctctttcaaatgtgctaattcaggtccgtctcctgcaatctgtaaataaacattttcagagtactgtgacatcgaaaatgcttctaagagcaattcaatgcctttttctttaataattctaccagcataagtgatgaaaatatcatcagcagatttttcaaggtaagccgtaccagcaaaatcagagcctagactttcagataccgaattataaataactcctttagcttctatattaaaatgttttaaccattcaacgcttctcttggataccgcataaaaatctggacgataatgcttaacacgcgctgtgagaagatgttcatagatagctccaaagaaatctaaaaaacgattattgacagaaaaatgacttgacccatggtctaaaacaatactaggtaaatggtgattctttgcaaaagatagcccttctagcgttgttaactgaaaacgtgtattacaaatcacaaaatcaatattttcatctgaaacatatttcatcagcgtgttgtattctcgatttttgttaataataggatagcgctgcttgacaatatttttggtcggtaaacggtaaatttttctacccttgtcttcatctataatcggtaaatcaccatgattagttgttacaataacaacacggtagccacgcttaaccaaatctgctgtcattttatctgtataacgttcaatacctccgaggaagggtagataatatcctgagaaaacagcaactgtttttaccttattttccatatttatccactttcatcaataagccatcttttaagcctttaatcatagcaactatttttttgctcttttgctcttctgctaccaacactcgaacaaattcatttcgcataaatactaaatatttgtatcgcttcttcttaccatatttttttataatatagatcgcattgcgtatcatgtaatattttcgaaatggtgaatgattcaatacatgaaaaacatggccaaattttttaactcgtgaagagtgtccaatttcgtgtaacagaccaataaaattaacctgataagtcttatatcccatctctgacagacgataattcatttcagagtcaacaaaatcaataaacatctcttctgcaaagccagatgtttcttcgaaaacgctcgttttcattaaagcagccgaagtaatacactcttcaatttctttatagtcaaattcttgcatcactaaattttcacggttcatatcttgatacaaacaagataacataccgaccttaggtaaatgaaggtaattttcataattatctatcaaatcacctaggacaaccgaatcttgatctaaagtcaagaaccaatcaaattcttgtgctactgcaaattgaccgatacagttcaaagcatatgcaatccctttattttctgttaaataatcaacagttaggtgcccctcttcattataatcggctactaattgagaaatttcttccttatttttcgagccattatctacgatatagatgtggcttacttgaggataaattgctcgaatgttctgatctaagcgttcaatattggggttaaaggtgacaatacccgctaaatatttcatgttctatgctcttttctaaaatctctaaataactgaatgactggtgctttggttataaaaacgataccgacatagatagttactgctactaaactttgaatgacataatttaccaatgatactgacatttgagtattgatataatagagtacagctccactaagagtagcagcaattaaatagcgcagcattcctcttgttaattctttaaaagtaaatacatctcttaaagagatagcttgatatagggagacaataaattcagtaataactgtagagataatagctcccatagcacctaaaattggtattaaaagtatattaagcacaacatttgccacaagtccaataactgcagacattgtgtaagcttttgtacgtcttgaagccagtagatactgtgtccctaaagcgttaccataagaaatgcaaatgatcatcaaa

SEQ ID NO: 305 - DNA, 14000 bp, S. agalactiae
ggccttgttccgatgttgattccgataactcctggctcattaatagcctgttcgtaacgctctttaattatctctaacttagcatgggtattggtaaaattttgaaaatagactaagtatttattaacctcaggccactttctatgcatgaaatcaatttctttatagaattgttcacgaataggagcttctggagcaactatagcatcccctgaaccagaaactgtgcaaaaagtgcaccctcctctagcaactgttccgtctctgttaggacagtcaaaaccagcatctataggtaatttaaatattttttctccaaagagttctcgataataatcattaatcgcacgataacgttttttcataggataattgtatcacaattttaactaaaataacctcactactacaataaaactaaaaaagattggaacgtcagttagtcccaatcttttatttacttcactttctttaaccaatccttggctaaaaagatatacgcagttagattcaaaataccataagcaagtataaaaccagctaaaacatctgtcggaaaatgaacccctaggtaaatacgagataacccaattaaaaaaatgagcaaacccaaagtaccttggcacaacagtttccatatactcttaggcatatagtactgcaataaaataataatactcccaaatatcataaatgttcccatcgagtgcccactgggaaacgaatagccacctgcaaatactaaatgggttaaagttggtcttactctttgaaaaataagttttaaagaaagtatacatataccagagataatagcatttactgcgataaatctagcttgaggataccacttcttaaggtaacagaaagtgacgctcataatcgcaatagctatctggcttacagtattaccaatcacagtgattaacttgaaaaatcttgtagaaagatttggcaactgtcctctaacactttcttgaatagtttggtcaaatgaaattacagtgtcgggccaatatttgatgaccaatcctaaactgaaaaataagataatagcaataaatgcttgaataagtttactattttgacgagataacattagtctttttatatctttctaatattggcaaacaagccacgtaagttagatagaaaacaatcgaaattaaaattccctcaacgatattaaatggaataaccattgttaaaaggtaattgcctacaccaataaatgttctgatatcaaagttagcaaatatagcatacaaaggaatcgcaaagacatagttgagagctaccatagatacggtcaagctaactgtaccaaatagactagctttaataaaatcttttgcactctctctatttttccagaaaatagcgaaacttgctaaaaataaagctagagcaaccatattcatcggtaaaccaataaacgtttctggaccacgattagcaagtataacttttaaaagtgatcttaataagagtacaccataacttgatttcaaatcaaataaaataaaagcaactaacatcggaaggattgaaaaatcaacctttaaaaattctgctcctggtattaatggaaatgaaaccatcatcaatacaaaagataaggcagaaagaatggcgattgtcaccattttacgtgtatttgtcataaaaaaattcctccaatttaaataaattgaaagaagctccaaaggtaagcgtatgtacgcgaaaaaacctttgtcttctcccatccagactttactgtcggttgtggaatctcaccacatcagctttcgctcgcggactgatgcttcacaactgacaaataagttggaagcgattaccgccggtcgggaattacaccctgccctgaagacacctatagcataacaaaaaaaacttgcaattgcaagttttttaattactaattagtagtagtgattaaaaatcatattaataccaaattactatactgtatcgtttctttcagatttgctatttttagtttttcttaaaaagataaacaaaattcccaaaataatacaaccaagaattgtcagtcctccaccaataatcattcctgttttaggaagaaatgattgtggaaaaagcggttgtgatggtttaggatttgttggtggaggagtttctttttcgttttctacctctacttcctgtgttttattagcaactacagcaactacagcatccttcatagatatacggtaaccagttagtgcttttgcttctcgaaaaatatacttaccaggtaataaaccttcaacctcaatttctcccttatcatcagttactaatgaagtaatcccatcttgatcggtcgtaaatcgtccatttttaaagcgaactggctgattctggttatcgtataatacaaatattactccggatagccttttctttatctttccttcttttgtatatttaataagttttaatcggcctgtttcaacttttcgcttaggatttatctgtaattgatttgataacttatcatctggtaattcaatataaaaaggtactattgttgaaacgctttgatcagctttataagcacgaccaaagtacgaaccatttgggagtgctatctttgtctgaccattagtatcagtaggagaagtcaagatactcttatacttctggttcaattcgctatctgtcatttggctcaataaatcaacttttaagttgtcagtcacagtccataaacgataagaaatcccctcctctgtagtatttggctgaagtcctatctgtgtgattgttagttgattaggggtatcagcatttacactggctaccgaaaaaaacgctaattgtaccaatcctaaaaagcaacatagtagaagtcctaaactttttctaatctttttcatttttgatttccctttctctttctctctttaaattttcgttttaaatataatagtaaagcgactaatataagaataactaggattgataagaggaaataaagtttatagtgtgtttgcaattctttcattaaatagttcttttctttaacaggaggtacatacttgattcgatgccctctaactagtaaacgatgtgaattaatcgaataaggtgtacatgttagcaaagtcgcataatccttacctttaacaaccaataatttagaaaaattatctggctttacaacacttatttgatcaaccttataggctaaaacttctttgatattatgaatataaaaaatttttccttttttaagtttatctaaatctgtaaataacttagctttaggtaagccgcgatgagctgtgataacagtatgtgaactttttccaccaattggcaaggaggttccttcaaggtgtcctgctcctttttcaagaacactactggtagtccccgcatagataggtaatttttgcttgatagacggtatatcaatatatccaatcatttcagcaatctcaagcatgtgggcgtattcagcaataccttttttttctttttcagtatagggatctgataggcggcttgggtccagtgttctattataagcttttgctaactcaaatcgtctattaatctctttagtatttaatttttgggtttgattatcaaagttagttacttgattattagctttaatattatagtaccaatttgaaataaaaggatatgaggttatcaaaagaccaactaagaacaatagtatcaagcctacattcatccatcgatttaaaacgaccgatttcttaaggtttttctgaaattttcctcccattatgattcaattccttttctaacacttgctaaacgatttttttgacgttgacgttttattaaccaaagtaaccaagcaataataactaaagatatatagaatagatatctataaatcgtgtttaaatgaccgtcttttattaatttttcatcaataggacctttataagggatacgatgtccccttactaaaagtctgtgtgtattgatcataatcggggtgcaagtcaataaggttgcataatcatgtccaggaacaaccaacaaatctgaaaagttatcgggtgtaacgacttttatctgatctacttgatatgctatcgtttcttttatgttttgaatataaaacttatctcctttttttaactttttaaggttagaaaagagttctttatctggaattcctgaatgcgctgttataacagtatgtgtactattgcccccaattggaagagaggtaccttctaaatgccctgctcctttagatagaacttcttgacttgaacctgcaaatatagggagtttttgacctatcttaggaactgaaattgttccgattttttcacttacctctaacatacgggcgtactctgctacccccttttgaattcgttttttctcataaggatcttcaagatggacattatttaaagaatcattataagcttgtgctagagccatacgtcgattgatttctttctgactaagttttttagcagctctctcaaaatcctgtgtttgattattagattctatcgtatagtaaaaacgtgataccactggatacaataaaatagatagacctattagaaaaagaatgataaaaggaagatttgacttcttctttttttttgtttttttgatgatttttttagtcttcacgtcatctcctagataatggctcttgcttatgatctaagagtacttctactgaaatacccttagatcataagcacagctttaactgcgcttatacatcatcaaagactagccttaagcttcctttgattggcgtcttttcatgataactactgctccaagcataatgcttaaaccaataattgtgaaaagaattgtaccaataccacctgtttgtgggattgttacctttttattttctacacgtgtcgcatctttttggttgctgttagcaacgtagtcaatgttaccacctgttatgtatgacccttgattaactacaaacttaatattacctgccaacttagcaaatcctgctggagcaagtgtttcttcaaggttgtaagtaccgtctgcaagacctgtaacttcaaattgaccttgatcgtttgaagtgtaggtaatggctctagccttatctgttatccactcataagctgtacgagcctcaatgaaggctgcatcgtaatctgcttgtttagttttgataagttcttttgcagtaattcctttttcacctttttggtctgttgcagacaacttgttataagcagcgatagcttcatctaaagctattttcttagcagctaaagttttttgaccttctgattgatctgctttaagagcaaggtatttacctgctgagtttttcacaacgaattgtgcaccagccaaacggtcaccttgttcattagttttgacaaatttcttaccatgagtttcaacttttggttcagttgggttcaatggtgttgggttatcagaatctttggtattggtaatggttactttaccattttctagatttattgcacttccgtaaccagaaacacgttctgagatcatgtatgatttgttttctagaccagtgaatttacccgagaagttaccagatacttcaaatttgataccatttccaaggtcgattgtacctttagatgtttttgtcaatgatactgaagcaacagttttatctttatctttcaatgtgtaaacaacgtttacaccatcaggtgcaattccgtcagaccaagttttagcaactgttacttcaccctttgaaggtgtaacaggaagttcagtcaagtctttacctggtttgttaccatacgacaatttgatatcattggattctggattatcaataattgcttgaccattaacagtagcactataagtcaatgtaaattcaatatcagctgttttagctgctttttccaatttgcccaatccatcagctgtgaattttaatgtgaaaccacgggcatcaatgctaagttcatagtctgtatccttagcaaaagtttctgtagttcctgaagctttaaggctaacagttgaacccattgtcaaaccatttgacattatatctgtccaaaccaagttttcgtatttagaacctttgtgaatttttgttttaacttcataaggaacaactttaccgatttcagcagtagcagttgctttgtcacgtgcataattaccataatttgcgccagctgtcaaaagtctattaacatctgtcaatgctgtcaaatcgtttgttttagcaaagtttttatcaatttctggtttttcttcagtgttctttggataaacatgggcatcagcaacaacaccatcttcatttaccaatggaagagtgatgttaactggaaccgcttttgaagcagccaggagggaaccattattgttgtaagtagattttgatttaacttcaacaattttaaactcgcctttcaatcctttggtgttgaaaacaagtccagtatctccctctggtgtcaatccagacacggcctcatcaatatttactgttatttcaggagtaccatctttattaattaaggctggtgttaatttgttaccttcttttgccttaacatattgcactttaccacttttatcttctttcaaagctaaagcaaagaacgcaccttcgatttctttagatccctcgccaaagtaaccagcaaggtcagaaatagctccacctttgtagtcttttccgttaagacctgtagttcctgggaagttacttttgttaagatttgattcggtttgcaaaatcttgtgcaaagtcactgtattagttgttgcttcatccgcaaacgctggtgcaactgagagcaatgacgttaaagtcagtaacaatgccgagaacattgcaaaatatttgttgattcttttcatttctatctccttcttattttagttaatcaacatgattaataatatgcggattttaatacaccgcagcaccactcccttcaagtcatggaattttagttaattaattaagaatactaaagcgcataatttttaatcttttttgatggacatatcactagatttcttataccttttccaaatataaattccacctgcaatagacatcatagctccacctattaaaatgaaagatagaattcctttcccacctgtcataggaataattccttttggtggaatatgcgtgttggtaattaaatgcttgtcaccttcctcatgatattcagaaatctgtttattaacagctattatattttttatcgatcctttaaccacttcaaaagttaaaattggtttattagtaattttttgataatcctccggcgaaactgcttctattaactgatatttgccatctttcaaatctttgtaagaaattttgccgttttctcccgtcactacttttgaattattattttttattggtaaataaagtttataatcttcattaaattcttgaagttcaaacgtagctcctttgagaagcaatttattattatctttatcaacttttataaattcaatttcacctaacttcttctcgtttttaatcgttattgtaggatattctctcacatcacgaattttagggattggaaaatctctaagtgtattaggatcctctgacttaggattcaatgttgttctaccattagtgtcatagaatttgttacttataaaactgtcatctagtttcacatcatatgtgagtgttactttttgaccttctcctaaattcaaacctctaacatagagtttatttccgatgtattctaatttaacccccttaagtattccaccatcattattgggcccaccagttgcaataccatccttcattacacttccatcatttccctgtaaagtataatcacttggctgtaatgtttgtccattaccaagctgtaaattgattttatcacccataggatcttcgatagttccattaacaattgagttttcttttgttaaaatcgtttcaaattgttgctgaattttagataaaatttcattgttagatgtatcggctgaagttacgataggggtgtagtactcaggtttggaagagaacgacctcattagttctgtgatttctccatctgaaagtttaaaagcttcctctttcaatttttgaaaagtaccatcttgatttttcttatactcctcattataaacttgtctaaaaccagatatatcgataccaaaattaaaaatgtcataatttttctgttttaaactatttatataaagtttggttggtgttccatgttctttcactggtccatttcgataaattgtacctttagggtaattaagatttaaatctaaataatgaagtttttgtaagtttccagagattatctgtgtttgataactatctaagggaaacaaaaagtaactctccccatttccttttatatcctcgggcttatcagtaagtagaaaattacttttatttagatatccattttttttcatttgttcaaattggctttcatatgatgcacccagtttaaaattattaatagcatatgatctcgtaggaacaccatcagttacatgaacaataattttttgactatttcgatttacttgactcaaaatatcatctgcctccatgaaggctttcatagtaaatgtttctcctactttactaagatagtactccttttgttgctctggagttaatccataggtagtagatccccacttagctttaggagcttctgtcggaatcctttttataatctcttcagcattatttgttaattgtttatgactataattctctgtctgaattgtgaacttagtttgaaggccataatatttatcatcttctttaaatccttttacgacatctacactcctaccatcaaaaatatctgaaccataggtaactaatgcaaccctattatcactgtttgctcctaaaatatcttttactgcggtcccaagagcttcggcagctttcttggctttattatgcctttgaaaatttgggccatcgttattcattgagttagaattatcgagtacgaagacaacatctaacggcttttgtttgtccactggttttactatggtttttccactgacagttaactcaattttatatttattatgagctaaatcacctacttctgaaatacgtttagataatgttccctctggaatttctcttatatgctcaccttcacttgaatatgggttaactgcttttgcctctgactttccatttggaactgaacctttaacatgctcaagtttataagattcctttgtatcttcataaattcctgtggggggatactgcttatctagttcttcctgattttgtccaattgtggaatttttatcaccactattttgtatcgtagtttttccattactctcaaccttaacttgccaagtctggttagtctttttataaccttcgggcgctgtttcttctgataaagtataatctccaggtatgagattatcaaaagtagcttcacctgttagctcagcagttactttttctattttactttctggatgagcagtagtttttaaaacaaaggtagcttttgaaagtggtttgttctggtcatctgtctttttaacaactaactttcctttagcaccattttccggtacggtactttcccctaaaacattggtattaagcggtatttgcgacaaacaaaaaagacttaacgtcaatattttagaaaatttttggtattttctcattttacaactcctattgtgccgaaatgtcgtttctaaatctaagatcagatacagaatatcctagaatatacaaactatcacttattatgatatcaataatttcttattataaggtatggaattttaatgttttttcccaatttttgaataatttttctttttatttgataatcttattttttattatcttagaaatatttcaatgagcttaagtagttgatttttctttttttatgttttaaaatattgcttaaaaataatgtttgagagagtttactgaattgattgaaaattatttagaaaaagacatccttaatcaaataaaacttctaactttatgctatgattactacccttccattactctagacaaatcatgtcatcaacttggtttatctgaactacttattaggaaatattgtcatgatttaacaactttatttaacagtcaactctctctgaatatcgaaaagagtacaatagtctaccaatctaatggtgtaactagagaacaagctttcaaatatatttatcatcaatcacacgttttacaacttttaaaatttttgatcacgaatgattcaggcaggttacctttaacttactttagtgaaaaatttggactatcttgtgcaactgcttatcgcatatgaaaacatattagtccattactagaaaaacttggatttcagattgtcaaaaatactattaccggtgacgagtatcgaattcgctatttaatcgcatttttaaatgctcaatttggtatagaagtttatcccatgtctaagatggataaattgctcatcaaacgattgttattagaacactcaactacttttactgcttctcattacttcccaaatacattgattttctttgatacattgttgtctctatcatggaaacgtattaattataatgtagttgtcccttactcatcccttttcactgaactacaaaatatatttatctatgatacattacaatattgtgtcaaaaatgttattatagattcctttaaaattaatttaaaaaaagacgatatagactatatttttcttgcttaccttacttcccataactctttttctaatccaaattggactgagaagcgtatcgataatgtaatagctattttcgaaaattatcccaaattccaaaaattattacagccactcaaagatgctcttcccttatctggctcctatcatgatgagttggtaaaagttgctatcttttttttccgaacatttattttaggattaaatcaattaatccctgaaacaatttcatttccttcatggaactatcatagacatgataaattaactactattctccgaccgataattacaaattggttaagtaaaattggagaatgcacgtttaaagaacaacattttcttctcctttgtactcatctagaaagaatcatcaaaaatcatattcctccgatacagatagccgtactaactacagactttattaataaccaaattttaacagaatgcttattacagagattttcttctaaaaagattcatttccacccttactatttattaactgatgatctttccaatattactaatcttaatccagacattattattaccaataaaaagctttctccctttatcaaacatgagatttcttcagagagtttaattacatatattgatctgattaatacttcagaccaaatcaatcaaatccaaaaaattatttcatcaatacaggaagaaaaatattgcaaactttttgcaaaaactaatgaaataactaatcgtagctcctataactcttaaaaattaacattaaaaagctagagcattgtgtaatgctctagctttttaatgttaatttttttgaataatataatccaacttttcaactgttttttcccatgtgaaatgttctttaattcttttagcaatattctgttgtagtttctctcttaatgccttatcttttactaataaatcaagagattcatggagtgactgagtattttcttccatgatgattcctaactcagggctatcaataacttcaactgttccaccgcgatctgttgcaataatagcacttgaaagtagaccagcttctaaaatagaggttggtaatccctctggatacattgaagggtaaacaaagatatcagtctgtgccattaaagacatagtctgttcaaagtttaatttccccaaaaagttaatctgtttggactgatatttctctttcaaatgtgctaattcaggtccgtctcctgcaatctgtaaataaacattttcagagtactgtgacatcgaaaatgcttctaagagcaattcaatgcctttttctttaataattctaccagcataagtgatgaaaatatcatcagcagatttttckaggtaagccgtaccagcaaaatcagagcctagactttcagataccgaattataaataactcctttagcttctatattaaaatgttttaaccattcaacgcttctcttggataccgcataaaaatctggacgataatgcttaacacgcgctgtgagaagatgttcatagatagctccaaagaaatctaaaaaacgattattgacagaaaaatgacttgacccatggtctaaaacaatactaggtaaatggtgattctttgcaaaagatagcccttctagcgttgttaactgaaaacgtgtattacaaatcacaaaatcaatattttcatctgaaacatatttcatcagcgtgttgtattctcgatttttgttaataataggatagcgctgcttgacaatatttttggtcggtaaacggtaaatttttctacccttgtcttcatctataatcggtaaatcaccatgattagttgttacaataacaacacggtagccacgcttaaccaaatctgctgtcattttatctgtataacgttcaatacctccgaggaagggtagataatatcctgagaaaacagcaactgtttttaccttattttccatatttatccactttcatcaataagccatcttttaagcctttaatcatagcaactatttttttgctcttttgctcttctgctaccaacactcgaacaaattcatttcgcataaatactaaatatttgtatcgcttcttcttaccatatttttttataatatagatcgcattgcgtatcatgtaatattttcgaaatggtgaatgattcaatacatgaaaaacatggccaaattttttaactcgtgaagagtgtccaatttcgtgtaacagaccaataaaattaacctgataagtcttatatcccatctctgacagacgataattcatttcagagtcaacaaaatcaataaacatctcttctgcaaagccagatgtttcttcgaaaacgctcgttttcattaaagcagccgaagtaatacactcttcaatttctttatagtcaaattcttgcatcactaaattttcacggttcatatcttgatacaaacaagataacataccgaccttaggtaaatgaaggtaattttcataattatctatcaaatcacctaggacaaccgaatcttgatctaaagtcaagaaccaatcaaattcttgtgctactgcaaattgaccgatacagttcaaagcatatgcaatccctttattttctgttaaataatcaacagttaggtgcccctcttcattataatcggctactaattgagaaatttcttccttatttttcgagccattatctacgatatagatgtggcttacttgaggataaattgctcgaatgttctgatctaagcgttcaatattggggttaaaggtgacaatacccgctaaatatttcatgttctatgctcttttctaaaatctctaaataactgaatgactggtgctttggttataaaaacgataccgacatagatagttactgctactaaactttgaatgacataatttaccaatgatactgacatttgagtattgatataatagagtacagctccactaagagtagcagcaattaaatagcgcagcattcctcttgttaattctttaaaagtaaatacatctcttaaagagatagcttgatatagggagacaataaattcagtaataactgtagagataatagctcccatagcacctaaaattggtattaaaagtatattaagcacaacatttgccacaagtccaataactgcagacattgtgtaagcttttgtacgtcttgaagccagtagatactgtgtccctaaagcgttaccataagaaatgcaaatgatcatcaa

SEQ ID NO: 306 - DNA, 14000 bp, S. agalactiae
ggccttgttccgatgttgatcccgataactcctggctcattaatagcctgttcgtaacgctctttaattatctctaacttagcatgggtattggtaaaattttgaaaatagactaagtatttattaacttcaggccactttctatgcatgaaatcaatttctttatagaattgttcacgaataggagcttctggagcaactatagcatcccctgaaccagaaactgtgcaaaaagtgcaccctcctctagcaactgttccgtctctgttaggacagtcaaaaccagcatctataggtaatttaaatattttttctccaaagagttctcgataataatcattaatcgcacgataacgttttttcataggataattgtatcacaattttaactaaaataacctcactactacaataaaactaaaaaagattggaacatcagttagtcccaatcttttatttacttcactttctttaaccaatccttggctaaaaagatatacgcagttagattcaaaataccataagcaagtataaaaccagctaaaacatctgtcggaaaatgaacccctaggtaaatacgagataacccaattaaaaaaatgagcaaacccaaaataccttggcacaacagtttccatatactattaggcatatagtactgcaataaaataataatactcccaaatatcataaatgttcccatcgagtgcccactgggaaacgaatagccacctgcaaatactaaatggggtaaagttggtcttactctttgaaaaataagttttaaagaaagtatacatataccagagataatagcatttactgcgataaatctagcttgaggataccacttcttaaggtaacagaaagtgacgctcataatcgcaatagctatctggcttacagtattaccaatcacagtgattaacttgaaaaatcttgtagaaagatttggcaactgtcctctaacactttcttgaatagtttggtcaaatgcaattacagtgtcgggccaatatttgatgaccaatcctaaactgaaaaataagataatagcaataaatgcttgaataagtttactattttgacgagataacattagtctttttatatctttctaatattggcaaacaagccacgtaagttagatagaaaacaatcgaaattaaaattccctcaacgatattaaatggaataaccattgttaaaaggtaattgcctacaccaataaatgttctgatatcaaagttagcaaatatagcatacaaaggaatcgcaaagacatagttgagagctaccatagatacagtcaagctaactgtaccaaatagactagctttaataaaatcttttgcactctctctatttttccagaaaatagcgaaacttgctaaaaataaagctagagcaaccatattcatcggtaaaccgataaaggtttctggaccacgattagcaagtataacttttaaaagtgatcttaataagagtacaccataacttgatttcaaatcaaataaaataaaagtaactaacatcggaaggattgaaaaatcaacctttaaaaattctgctcctggtattaatggaaatgaaaccatcatcaatacaaaagataaggcagaaagaatggcgattgtcaccattttacgtgtatttgtcataaaaaaattcctccaatttaaataaattgaaagaagctccaaaggtaagcgtaggtacgcgaaaaaaacctttgtcttctcccatccagactttactgtcggttgtggaatctcaccacatcagctttcgctcgcggactgatgcttcacaactgacaaataagttggaagcgattaccgccggtcgggaattacaccctgccctgaagacacctatagcataacaaaaaaaacttgcaattgcaagttttttaattactaattagtagtagtgattaaaaatcatattaataccaaattactatactgtatcgtttctttcagatttgctatttttagtttttcttaaaaagataaacaaaattcccaaaataatacaaccaagaattgtcagtcctccaccaataatcattcctgttttaggaagaaatgattgtggaaaaagcggttgtgatggtttaggatttgttggtggaggagtttctttttcgttttctacctctacttcctgtgttttattagcaactacagcaactacagcatccttcatagatatacggtaaccagttagtgcttttacttctcgaaaaatatacttaccaggtaataaaccttcaacctcaatttctcccttatcatcagttactaatgaagtaatcccatcttgatcggtcgtaaatcgtccatttttaaagcgaactggctgattctggttatcgtataatacaaatattactcctgatagccttttctttatctttccttcttttgtatatttaataagttttaatcggcctgtttcaacttttcgcttaggatttatctgtaattgatttgataacttatcatctggtaattcaatataaaaaggtactattgttgaaacgctttgatcagctttataagcacgaccaaagtacgaaccatttgggagtgctatctttgtctgaccattagtatcagtaggagaagtcaagatactcttatacttctggttcaattcgctatctgtcatttggctcaataaatcaacttttaagttgtcagtcacagtccataaacgataagaaatcccctcctctgtagtatttggctgaagtcctatctgtgtgattgttagttgattaggggtatcagcatttacactggctaccgaaaaaaacgctaattgtaccaatcctaaaaagcaacatagtagaagtcctaaactttttctaatctttttcatttttgatttccctttctctttctctctttaaattttcgttttaaatataatagtaaagcgactaatataagaataactaggattgataagaggaaataaagtttatagtgtgtttgcaattctttcattaaatagttcttttctttaacaggaggtacatacttgattcgatgccctctaactagtaaacgatgtgaattaatcgaataaggtgtacatgttagcaaagtcgcataatccttacctttaacaaccaataatttagaaaaattatctggctttacaacacttatttgatcaaccttataggctaaaacttctttgatattatgaatataaaaaatttttccttttttaagtttatctaaatctgtaaataacttagctttaggtaagccgcgatgagctgtgataacagtatgtgaactttttccaccaattggcaaagaagttccttcaaggtgtcctgatcctttttcaagaacactactggtagtccccgcatagataggtaatttttgcttgatagacggtatatcaatatatccaatcatttcagtaatctcaagcatatgggcgtattcagcaataccttttttttctttttcagtatagggatctgataggcggcttgggtccagtgttctattataagcttttgctaactcaaatcgtctattaatctctttagcatttaatttttgggtttgattatcaaagttagttacttgattattagctttaatattatagtaccaatttgaaataaaaggatatgaggttatcaaaagacctactaagaataataatatcaaacctatattcatccatcgatttaaaacgaccgatttcttaaggtttttctgaaattttcctcgcattatgattcaattccttttctaacacttgataaacgatttttttgacgttgacgttttattaaccaaagtaaccaagcaataataactaaagatatatagaaaagatatctataaatcgtgtttaaatgaccgtcttttattaatttttcatcaataggacctttataagggatacgatgaccccttactaaaagtctgtgtgtattgaccataatcggggtgcaagtcaataaggttgcataatcatgtccaggaacaaccaacaaatctgaaaagttatcgggtgtaacgacttttatctgatctacttgatatgctatcgtttcttttatgttttgaatataaaacttatctcctttttttaactttttaaggttagaaaagagctctttatctggaattcctgagtgcgctgttataacggtatgggtgctattgcctccaattggaagagaggtaccttctaaatgacctgctcctttagatagaacttcttgacttgaacctgcaaatatagggagtttttgacctatcttaggaactgaaattatgccgattttttcacttacctctaacatacgggcgtactctgctatccccttttgaattcgttttttctcataaggatcttcaagatggacattatttaaagaatcattatatgcttgtgctagagccatacgccgattgatttctttctgactaagttttttagcagctctctcaaaatcttgtgtttggttattagattctatcgtatagtaaaatcgtgataccactggatacaataagatagatagacctattagaaaaagaatgataaaaggcagatttgatttctttttttttgtttttttgataatttttttagtcttcacgtcatctcctaaataatggctcttgcttatgatctaagagtacttctactgaaatacccttagatcataagcacagctttaactgtgcttacacatcatcaaaagctaatcttaaacttcctctgattgacgtcttttcatgataactaccgctccaagcataatacttaatccaataattgtgaaaaaaattgtaccaataccacctgtttgtggaatagtaaccttcttattgataacttgttgtgcatctttagttttagaaccttgggtatactcaatatcttgagcagaacctttactgtatgaagtagcattaacattaaacgaaacatcacctgataatttagcataaccagttggtgcttgtgtttcttccaatgagtattgaccttcagtcaagccagtaatttcaaattgacctttatcgttagaaatcaatttaacaacattcttagcatttttatcttcaacccattcgtatgagtagttagctttaacaaaggcatcattgtaagctttttgtttttcactaacggtagccaatgctgatttaccatcttgaccttcttgtttttctttagtcaaatcattgtaagctttaacagcagcatccaatgctgatttagttgaatctacagcagctttttctgcatctgttgcaacacctgatttacgtgccaagtacttgccatctttcttaacaaggaaggtagctcctgccaagcgttcttttccatctttatttgttttcacaaatttacgtccataagtcaccacttttggttctgatgggttgattggagttggctcatttgagtctttgttgttcttgatggttacaacgccatttacaaatgagacgtattctggagcgtagccgctaacacgttcgataacgcggtaagttttagcattatccaagttttcaaaagtgtgtttgaagctagttgcagctgttgctttagctgaatcaacattcacccatttgtcaccatctttaacttgcaaggtgaagacagcatcaactgtttcatctgctttattcacttcattgccatctactgcccatgttttgttaacagtgattttcttatcaactggaataccttcttttggttcattttcaattgttgggttgttgccgtagtccaatttaacatcattggtttctagaacttcaacgacagcagaaccgttcaaagtagctgagtaagtgatcttgatttcaacatcttttgtttttgcggcttttgccactgcttcaagacctttgtcagtcaagacaaggcggaaaccttggtcatctgctacaagtttgtaatttgtagcatcaagagttgcaccatccaatgttacagcaatatcgttgttgaaagtcaaacctttggtcatgctatcggtccagattaatttcttatagtctgaacctttaaggatttttgttccaacatggtattttttaacatcaccaacagatgctgagacagtccctttgtcttttttgttgttcgcataatcaagttctttatctgcgaagttcttatctacttgtggttttgtttcagtgttctttggataaacgtgagcgtctttaacaacaccattgtcgtttaccaatggaagagtgattttaactggaactgcttttgaatcagccaagatagaaccatcgttgttgtatgtagatttttctttcaattcaacgatttggtaagttcctgttaatttagaagtgttaaatttgaaaccattgtctgttgttaaacctttaagaacagcacaacctttggcatctgttgtatccaaagtatcaacttcttcaccattttcagtgatgtatttagtaccagcttcatttttgaaagcaaagtaagcacctgcgatttctttcgcttcgcctgagccaaagtaagttttaaggtcttcgatttgtttaccaacgtagtcagtattatccttaccctttgtaccagcagtaaaaccgtcaaatgcagttcgaggcatgacaatcttgtgcaaggtcactgtgtcagtagtttttgcttcttccgcaaacactggtgcaactgagaacaatgatgttacggtcagtagcaatgccgagaagactgcaaaatatttgttgatttttttcatttctatctccttcttattttagttaatcaacatgattaataatatgcggattttaatacaccgcagcaccactcccttcaagtcatggaattttagttaattaattaagaatactaaagcgcataatttttaatcttttttgatggacatatcactagatttcttataccttttccaaatataaattccacctgcaatagacatcatagctccacctattaaaatgaaagatagaattcctttcccacctgtcttaggaataattccttttggtggaatatgcgtgttggtaattaaatgcttgtcaccttcctcatgatattcagaaatctgtttattaacagctattatattttttatcgatcctttaaccacttcaaaagttaaaattggtttattagtaattttttgataatcctccggcgaaactgcttctattaactgatatttgccatctttcaaatctttgtaagaaattttgccgttttctcccgtcactacttttgaattattattttttattggtaaataaagtttataatcttcattaaattcttgaagttcaaacgtagctcctttgaggagcaacttattattatctttatcaacttttataaattcaatttcacctaacttcttctcgtttttaatcgttattgtaggatattctctcacatcacgaattttagggattggaaaatctctaagtgtattaggatcctctgacttaggattcaatgttgttctaccattagtgtcatagaatttgttacttataaaactgtcatctagtttcacatcatatgtgagtgttactttttgaccttctcctaaattcaaacctctaacatagagtttatttccgatgtattctaatttaacccccttaagtattccaccatcattattaggcccaccagttgcaataccatccttcattacacttccatcatttccctgtaaagtataatcacttggctgtaatatttgtccattaccaagctgtaaattgattttatcacccataggatcttcgatagttccattaacaattgagttttcttttgttaaaatcgtttcaaattgttgctgaattttagataaaatttcattgttagatgtatcggctgaagttacgataggggtgtagtactcaggtttggaagagaacgacctcattagttctgtgatttctccatctgaaagtttaaaagcttcctctttcaatttttgaaaagtaccatcttgatttttcttatactcctcattataaacttgtctaaaaccagatatatcgataccaaaattaaaaatgtcataatttttctgttttaaactatttatataaagtttggttggtgttccatgttctttcactggtccatttcgataaattgtacctttagggtaattaagatttaaatctaaataatgaagtttttgtaagtttccagagattatctgtgtttgataactatctaagggaaataaaaagtaactctccccatttccttttatatcatcgggcttatcagtaagtagaaaattacttttatttagatatccattttttttcatttgttcaaattggctttcatatgatgcacccagtttaaaattattaatagcatatgatctcgtaggaacaccatcagttacatgaacaataattttttgactatttcgatttacttgactcaaaatatcatctgcctccatgaaggctttcatagtaaatgtttctcctactttactaagatagtactccttttgttgctctggagttaatccattggtagtagatccccacttagctttaggagcttctgtcggaatcctttttataatctcttcagcattatttgttaattgtttatgactataattctctgtctgaattgtgaacttagtttgaaggccataatatttatcatcttctttaaatccttttacgacatctacactcctaccatcaaaaatatctgaaccataggtaactaatgcaaccctattatcactgtttgctcctaaaatatcttttactgcggtcccaagagcttcggcagctttcttggctttattatgcctttgaaaatttgggccatcgttattcattgagttagaattatcgagtacgaagacaacatctaacggcttttgtttgtccactggttttactatggtttttccactgacagttaactcaattttatatttattatgagctaaatcacctacttctgaaatacgtttagataatgttccctctggaatttctcttatatgctcaccttcacttgaatatgggttaactgcttttgcctctgactttccatttggaactgaacctttaacatgctcaagtttataagattcctttgtatcttcataaattcctgtggggggatactgcttatctagttcttcctgattttgtccaattgtggaatttttatcaccactattttgtatcgtagtttttccattactctcaaccttaacttgccaagtctggttagtctttttataaccttcgggcgctgtttcttctgataaagtataatctccaggtatgagattatcaaaagtagcttcacctgttagctcagcagttactttttctattttactttctggatgagcagtagtttttaaaacaaaggtagcttttgaaagtggtttgttctggtcatctgtctttttaacaactaactttcctttagcaccattttccggtacggtactttcccctaaaacattggtattaagcggtatttgcgacaaacaaaaaagacttaacgtcaatattttagaaaatttttggtattttctcattttacaactcctattgtgccgaaatgtcgtttctaaatctaagatcagatacagaatatcctagaatataaaaactatcacttattatgatatcaataatttcttattataaggtatggaattttaaagttttttcccaatttttgaatgatttttctttttatttgatacattattgtctctatcatggaaacgtattaattataatgtagttgtcccttactcaccccttttcattgaactacaaaatatatttatctatgatacattacaatattgtgtcaaaaatgttattatagattcctttaaaattaatttaaaaaagacgatatagactatatttttcttgcttaccttacttcccataactctttttctaatccaaattggactgagaagcgtatcgataatgtaatagctattttcgaaaattatcccaaattccaaaaattattacagccactcaaagatgcccttcccttatctgactcctatcatgacgagttggtaaaagttgctatcattttttcccgaacatttattttaggattaaatcaattaatccctgaaacaatttcatttccttcatggaactatcatagacatgataaattaactactattctccgaccgataattacaaattggttaagtgaaattggagaatacacgtttaaggaacaacattttcttctcctttgtgctcacctagaaagaattatcaaaaatcatattcctccgatacaaatagccgtactaactacagactttattaataacaaaattttaacagaatgtttatcacagaggttttcttctaaacagattcatttccacccttactatttattaactgatgatctttccaatattactaatcttaatccagatattattattaccaacccaaagctttcttcctttataaaacatgagatttcttcagagagtttaattacatatattgatttgattcatactccagaccagatcaatcaaatccaagaaattatttcatcaatacaagaagaaaaatattgtaaactttttgcaaagaacaatgaaataactacccgtagctcctataactcttaaaaattaacattaaaaagctagagcattacacaatgctctagctttttaatgttaatttttttgaataatataatccaacttttcaactgttttttcccaggtgaaatgttctttaattcttttagcaatattctgttgtagtttctctcttaatgccttatcttttactaataaatcaagagattcatggagtgactgagtattttcttccatgatgattcctaactcagggctatcgataacttcaactgttccaccgcgatctgttgcaataatagcacttgaaagtagaccagcttctaaaatagaggttggtaatccctctggatacattgatgggtaaacaaagatatcagtctgtgccattaaagacatagtctgttcaaagtttaatttccccaaaaagttaatctgtttggactgatatttctctttcaaatgtgctaattcaggtccgtctcctgcaatctgtaaataaacattttcagagtactgtgacatcaaaaatgcttctaagagcaattcaatgcctttttctttaataattctaccagcataagtgatgaaaatatcatcagcagatttttcaaggtaagccgtgtcagcaaaatcagagcctagactttcagataccgaattataaataactcctttagcttctatattaaaatgttttaaccattcaacgcttctcttggataccgcataaaaatctggacgataatgcttaacacgcgctgtgagaagatgttcatagatagctccaaagaaatctaaaaaacgattattgacagaaaaatgacttgacccatggtctaaaacaatactaggtaaatggtgcttctttgcaaaagatagcccttctaacgttgttaactgaaaacgtgtattacaaatcacaaaatcaatattttcatctgaaacatatttcatcagcgtgttgtattctcgatttttgttaataataggatagcgctgcttgacaatatttttggtcggtaaacggtaaatttttctacccttgtcttcatctataatcggtaaatcaccatgattagttgttacaataacaacacggtagccacgcttaaccaaatctgctgtcattttatctgtataacgttcaatacctccgaggaagggtagataatatcctgagaaaacagcaactgtttttaccttattttccatatttatccactttcatcaataagccatcttttaagcctttaatcatagcaactatttttttgctcttttgctcttctgctaccaacactcgaacaaattcatttcgcataaatactaaatatttgtatcgcttcttcttaccatatttttttataatatagatcgcattgcgtatcatgtaatattttcgaaatggtgaatgattcaatacatgaaaaacatggccaaattttttaactcgtgaagagtgtccaatttcgtgtaacagaccaataaaattaacctgataagtcttatatcccatctctgacagacgataattcatttcagagtcaacaaaatcaataaacatctcttctgcaaagccagatgtttcttcgaaaacgctcgttttcattaaagcagccgaagtaatacactcttcaatttctttatagtcaaattcttgcatcactaaattttcacggttcatatcttgatacaaacaagataacataccgaccttaggtaaatgaaggtaattttcataattatctatcaaatcacctaggacaaccgaatcttgatctaaagtcaagaaccaatcaaattcttgtgctactgcaaattgaccgatacagttcaaagcatatgcaatccctttattttctgttaaataatcaacagttaggtgcccctcttcattataatcggctactaattgagaaatttcttccttatttttcgagccattatctacgatatagatgtggcttacttgaggataaattgctcgaatgttctgatctaagcgttcaatattggggttaaaggtgacaatacccgctaaatatttcatgttctatgctcttttctaaaatctctaaataactgaatgactggtgctttggttataaaaacgataccgacatagatagttactgctactaaactttgaatgacataatttaccaatgatactgacatttgagtattgatataatagagtacagctccactaagagtagcagcaattaaatagcgcagcattcctcttgttaattctttaaaagtaaatacatctcttaaagagatagcttgatatagggagacaataaattcagtaataactgtagagataatagctcccatagcacctaaaattggtattaaaagtatattaagcacaacatttgccacaagtccaataactgcagacattgtgtaagcttttgtacgtcttgaagccagtagatactgtgtccctaaagcgttaccataagaaatgcaaatgatcatcaaagactcaacagccattagcggaccgacagcttcataccctttcccaaaaaagaagacagcaaatgtcgacgaaactcctaccactcccgcaatcattaacattgagatagcattgcttaaatcaacaagtttcaaaagtaaagccttagcttgcttttcttttcctgaagaaaatagactggagagccttggtaagaaaactcctccgattgctgaaacaatggtaaataaaatacgaataattttatcagattgatcaaaatatccagcactgaccacactatccattgctcccagcatactcttgttaagagagagataaatctgcatggtgatttggggtaaaaataacattaaagttggtcttagatgtattaagatatctaatctactaaatggtatcttgatgatttcatgctttaaatgatgccagactgttaaatttccgagtaatgatgcaaatgcaattaaaaacatataaagtgctaggtcatctggcgtcttcacaactaagaaggtcaaaacaactgtaataagcttaacaatggtattacgaatgacaattatcttaaagtcttcaactccaataaaataccacgaaatatcagttgcagtcgctaataaattaataccttgaattaaatagaataattgccattcgtttgtaagtaagacaaatccaaagaataataacgttgctatagatacagaggcaagttttaatacaactaattcccaaaatatcttacttctcttatacttatttgactgcacaaaagctatctcacgattaccgtacaaagatatc

SEQ ID NO: 307 - DNA, 14000 bp, S. agalactiae
ggccttgttccgatgttgatcccgataactcctggctcattaatagcctgttcgtaacgctctttaattatctctaacttagcatgggtattggtaaaattttgaaaatagactaagtatttattaacctcaggccactttctatgcatgaaatcaatttctttatagaattgttcacgaataggagcttctggagcaactatagcatcccctgaaccagaaactgtgcaaaaagtgcaccctcctctagcaactgttccatctctgttaggacagtcaaaaccagcatctataggtaatttaaatattttttctccaaagagttctcgataataatcattaatcgcacgataacgttttttcataggataattgtatcacaattttaactaaaataacctcactactacaataaaactaaaaaagattggaactaactgacgttccaatcttttatttacttcactttctttaaccaatccttggctaaaaagatatacgcagttagattcaaaataccataagcaagtataaaaccagctaaaacatctgtcggaaaatgaacccctaggtaaatacgagataacccaattaaaaaaatgagcaaacccaaaataccttggtacaacagtttccatatactcttaggcatatagtactgcaataagataataatactcccaaatatcataaatgttcccatcgagtgcccactgggaaacgaatagccacctgcaaatactaaatgggttaaagttggtcttactctttgaaaaataagttttaaagaaagtatacatataccagagataatagcatttactgcgataaatctagcttgaggataccacttcttaaggtaacagaaagtgacgctcataatcgcaatagctatctggcttacagtattaccaatcacagtgattaacttgaaaaatcttgtagaaagatttggcaactgtcctctaacactttcttgaatagtttggtcaaatgaaattacagtgtcgggccaatatttgatgaccaatcctaaactgaaaaataagataatagcaataaatgcttgaataagtttactattttgacgagataacattagtctttttatatctttctaatattggcaaacaagccacgtaagttagatagaaaacaatcgaaattaaaattccctcaacgatattaaatggaataaccattgttaaaaggtaattgcctacaccaataaatgttctgatatcaaagttagcaaatatagcatacaaaggaatcgcaaagacatagttgagagctaccatagatacggtcaagctaactgtaccaaatagactagctttaataaaatcttttgcactctctctatttttccagaaaatagcgaaacttgctaaaaataaagctagagcaaccatattcatcggtaaaccaataaacgtttctggaccacgattagcaagtataacttttaaaagtgatcttaataagagtacaccataacttgatttcaaatcaaataaaataaaagcaactaacatcggaaggattgaaaaatcaacctttaaaaattctgctcctggtattaatggaaatgaaaccatcatcaatacaaaagataaggcagaaagaatggcgattgtcaccattttacgtgtatttgtcataaaaaaattcctccaatttaaataaattgaaagaagctccaaaggtaagcgtatgtacgcgaaaaaacctttgtcttctcccatccagactttactgtcggttgtggaatctcaccacatcagctttcgctcgcggactgatgcttcacaactgacaaataagttggaagcgattaccgccggtcgggaattacaccctgccctgaagacacctatagcataacaaaaaaaacttgcaattgcaagttttttaattactaattagtagtagtgattaaaaatcatattaataccaaattactatactgtatcgtttctttcagatttgctatttttagtttttcttaaaaagataaacaaaattcccaaaataatacaaccaagaattgtcagtcctccaccaataatcattcctgttttaggaagaaatgattgtggaaaaagcggttgtgatggtttaggatttgttggtggaggagtttctttttcgttttctacctctacttcctgtgttttattagcaactacagcaactacagcatccttcatagatatacggtaaccagttagtgcttttgcttctcgaaaaatatacttaccaggtaataaaccttcaacctcaatttctcccttatcatcagttactaatgaagtaatcccatcttgatcggtcgtaaatcgtccatttttaaagcgaactggctgattctggttatcgtataatacaaatattactccggatagccttttctttatctttccttcttttgtatatttaataagttttaatcggcctgtttcaacttttcgcttaggatttatctgtaattgatttgataacttatcatctggtaattcaatataaaaaggtactattgttgaaacgctttgatcagctttataagcacgaccaaagtacgaaccatttgggagtgctatctttgtctgaccattagtatcagtaggagaagtcaagatactcttatacttctggttcaattcgctatctgtcatttggctcaataaatcaacttttaagttgtcagtcacagtccataaacgataagaaatcccctcctctgtagtatttggctgaagtcctatctgtgtgattgttagttgattaggggtatcagcatttacactggctaccgaaaaaaacgctaattgtaccaatcctaaaaagcaacatagtagaagtcctaaactttttctaatctttttcatttttgatttccctttctctttctctctttaaattttcgttttaaatataatagtaaagcgactaatataagaataactaggattgataagaggaaataaagtttatagtgtgtttgcaattctttcattaaatagttcttttctttaacaggaggtacatacttgattcgatgccctctaactagtaaacgatgtgaattaatcgaataaggtgtacatgttagcaaagtcgcataatccttacctttaacaaccaataatttagaaaaattatctggctttacaacacttatttgatcaaccttataggctaaaacttctttgatattatgaatataaaaaatttttccttttttaagtttatctaaatctgtaaataacttagctttaggtaagccgcgatgagctgtgataacagtatgtgaactttttccaccaattggcaaggaggttccttcaaggtgtcctgctcctttttcaagaacactactggtagtccccgcatagataggtaatttttgcttgatagacggtatatcaatatatccaatcatttcagcaatctcaagcatgtgggcgtattcagcaataccttttttttctttttcagtatagggatctgataggcggcttgggtccagtgttctattataagcttttgctaactcaaatcgtctattaatctctttagtatttaatttttgggtttgattatcaaagttagttacttgattattagctttaatattatagtaccaatttgaaataaaaggatatgaggttatcaaaagaccaactaagaacaatagtatcaggcctacattcatccatcgatttaaaacgaccgatttcttaaggtttttctgaaattttcctcccattatgattcaattccttttctaacacttgctaaacgatttttttgacgttgacgttttattaaccaaagtaaccaagcaataataactaaagatatatagaaaagatatctataaatcgtgtttaaatgaccttctttcattaatttttcatcaataagacctttataaggaatacgatgtccccttactaaaagtctgtgtgtattgaccataatcggggtgcaagttaataaggttgcataatcatgtccaggaacaaccaacaaatctgaaaagttatcgggtgtaacgacttttatctgatctacttgatatgctatcgtttcttttatgttttgaatataaaacttatctcctttttttaactttttaaggttagaaaagagttctttatctggaattcctgagtgcgctgttataacggtatgtgtgctatttcctccaattggaagagaagtaccttctaaatgccctgctcctttagatagaactttttgacttgaacctgcaaatatagggagtttttgacctatcttaggaactgaaattgtgccgattttttcacttacctctaacatacgggcgtactctgctacccccttttgaattcgtttcttctcataaggatcttcaagatggacattatttaaagaatcattataagcttgtgctagagtcatacgacgattgatttctttctgactaagttttttagcagctctctcaaaatcctgtgtttgattattagattctatcgtatagtaaaaacgtgataccactggatacaataaaatagatagacctattagaaaaagaatgataaaaggaagatttgacttcttctttttagtttttttgttgatatttttagtcttcacgtcatctcctaaataatggctcttgcttatgatctaagagtacttctactgaaatacccttagatcataagcacagctttaactgtgcttatacatcatcaaagactagccttaagcttcctctgattgacgttttttcatgataactactgctccaagcataatgcttaaaccaataattgtgaaaagaattgtaccaataccacctgtttgtgggatggttacttttttgttttgaacttgttgggcatctttttttacagagcctttatcatatgcgatgtcagttgtagcccctttgctatatgatgtggcagttacttcaaagtttacatcacctgacaatgtcgcataacctgctggtgcttgagtttcttccaagccataagtgcctttatccaaaccagtaatttcaaattgaccaccggcgttagagatcaatttaacaacattatcagcctttttatctgcaacccattcatatgagtagttagctttaacaaaagcgtcattgtaagctttttgtttttgatcaacagtagccaatgctgttttaccttcttggccttcttgtttttctttagtcaagtcgttataagctttaacagcttcatccaatgctagtttagcagtttttacagctgcctttgcttcagcagttgctgcacctgctttacgtgccaagtatttgccttctttcttaacgaggaaggtagctcctgccaagcgttcagtgttagcttgatttgttttcacaaatttacgtccataagtcaccacttttggttctgatgggttgattggagttggatcatttgagtttttgttgttcttgatagtcacaacaccatttttaaatgatacgtattctggagtgtagccgctaacacgttcgacaacgcggtaagttttagcattatccaaacctgtgaaagtatgttcaaagcgtgatggttttgttgcttcgtgtgaagcaacgttcacccatgtaccatccgtttgtttttcttgcaaggtaaagatagctttaactgcaacattagcatcagtaattgtaccatctactgcccagtctttaatgactttaatttcttggttagctggagtaccttcttgtggttcactttcttccgttgggttattaccatagtccaatttaacatcattggtttctggaatttcaacagtagtggagccgttcaccgtagctgagtaagtgatcttgatttcaacatctttgtcttttgcagctgctgctactgctgcaagacctgttgcattcaaggcaagacggaaaccttggtcatctgttacgagtttgtagtttaaaacaggaaaatcttcaccatccaatgttactttaacgttgttgttgaacgtcaaacctttagtcatgctatcagtccaaaccagtttcttatagtctgagcctttaagaatttttgttccaactatgtattcttttttgtcaccaactgtcgctgagacaacacctttgtcttttcggttgtcagtataatcaagatctttatctgcaaagttcttatctacttgtggttttgtttcagtattctttggataaatgtgagcatctttaacaacaccttggttgtttaccaatggcagagtgattttaactggaactgcttttgaatcagccaagatagaaccgttgttatcgtagtttgatttttctttcaattcaacgatttggtaaattccttttaacttagcagtgttaaaaacaaaaccattgtcttttgttaaccctgaaagaacagcaccaccttcagcatctttagcttccaaagtatcgacttccttaccattttcagtaatgaattttgtaccagtttcatttttgaaaacaaagaaagcacccttgatttctttagcatcggttgagccaaaataagatttaaggtcattaatttgtttaccaacataatcgctatcattcttaccttttgtaccttcagtaaagttatcaaatgcagcttgtggcatgacaatcttgtgcaaggtcacagtatcagttgttgcgtcgtccgcaaacgctggtgcaactgagaatagtgacgttaagatcaatagcagtgtcgagaacattgtaagacatttgttgatttttttcatttctatctccttcttattctagttaatcaacatagataataatatacggattataatattaccgcagcaccactcctttcgaattatatttaattaattaagaatactaaaacacatgattcttaatctttttctctagatatatcactagatttcttatatcttttccaaatataaattccacctgcaatagacatcatagatccacctattaaaatgaaagatagaattcctttcccacctgtcatcggaataattccttttggtggaatatgcgtgttggtaattaaatgcttgtcaccttcctcatgatattcagaaatctgtttattaacagctattatattttgtatcgatcctttaacaacttcaaaagttaaaattggtttattagtaattttttgataatccttcggcgaaactgcttctattaactgatatttgccatctttcaaatctttgtaagaaattttgccgttttctcccgtcactacttttgaattattattttttattggtaaataaagtttataatcttcattaaattcttgaagttcaaacgtagctcctttgagaagcaacttattattatctttatcaacttttgtaaattcaatttcacctaacttcttctcgtttttaatcgttattgtaggatattctctcacatcacgaattttagggattggaaaatctctaagtgtattaggatcctctgatttaggattcaatgttgttctaccattagtgtcatagaatttgttacttataaaactgtcatctagtttcacatcatatgtgagtgttactttttgtccctcccctaagttcaaacctctaacgtagagtttatttttgatgtattctaatttaacccctttaagtattccaccatcattattaggcccaccagttgcaatgctatctttcattatacttccatcatttccctgtaaagtataatcacttggttgcaatgtttgtccgttgccaagctgtaaattgattttgtcacccataggatcttctatagttccattaacaattgagttttcttttgttaaaatcttttcaaattgttgctgaattttagataaaatttcattgttagatgcatcggatgaagttactatcggggtataatactcaggtttagaagagaatgacttcattagttctgttatttccccatctgaaagttcaaaagcttcctctttcaatttttgaaaagtaccatcttgatttttcttataatcctcattataaacttgtctaaaaccagatatatctataccaaaattaaagatgtcataatttttctgttttaaactatttatataaagtttggttggtgttccatgttctcttactggtccatttcgataaaatgtacctttagggtaattaagatttaaatctaaataatgaagtttttgtaagtttccagagattatctgtgtttgataactatctaagggaaacaaaaagtaactctccccatttccttttatatcctcgggcttatcagtaagtagaaaattacttttatttagatatccattttttttcatttgttcaaattggctttcatatgatgcacccagtttaaaattattaatagcatatgatctcgtaggaacaccatcagttacatgaacaataattttttgactatttcgatttacttgactcaaaatatcatctgcctccatgaaggctttcatagtaaatgtttctcctactttactaagatagtactccttttgttgctctggagttaatccattggtagtagatccccacttagctttaggagcttctgtcggaatcctttttataatctcttcagcattatttgttaattgtttatgactataattctctgtctgaattgtgaacttagtttgaaggccataatatttatcatcttctttaaatccttttacgacatctacactcctaccatcaaaaatatctgaaccataggtaactaatgcaaccctattatcactgtttgctcctaaaatatcttttactgcggtcccaagagcttcggcagctttcttggctttattatgcctttgaaaatttgggccatcgttattcattgagttagaattatcgagtacgaagacaacatctaacggcttttgtttgtccactggttttactatggtttttccactgacagttaactcaattttatatttattatgagctaaatcacctacttctgaaatacgtttagataatgttccctctggaatttctcttatatgctcaccttcacttgaatatgggttaactgcttttgcctctgactttccatttggaactgaacctttaacatgctcaagtttataagattcctttgtatcttcataaattcctgtggggggatactgcttatctagttcttcctgattttgtccaattgtggaatttttatcaccactattttgtatcgtagtttttccattactctcaaccttaacttgccaagtctggttagtctttttataaccttcgggcgctgtttcttctgataaagtataatctccaggtatgagattatcaaaagtagcttcacctgttagctcagcagttactttttctattttactttctggatgagcagtagtttttaaaacaaaggtagcttttgaaagtggtttgttctggtcatctgtctttttaacaactaactttcctttagcaccattttccggtacggtactttcccctaaaacattggtattaagcggtatttgcgacaaacaaaaaagacttaacgtcaatattttagaaaatttttggtattttctcattttacaactcctattgtgccgaaatgtcgtttctaaatctaagatcagatacagaatatcctagaatatacaaactatcacttattatgatatcaataatttcttattataaggtatggaattttaatgttttttcccaatttttgaataatttttctttttatttgataatcttattttttattatcttagaaatatttcaatgagcttaagtagttgatttttctttttttatgttttaaaatattgcttaaaaataatgtttgagagagtttactgaattgattgaaaattatttagaaaaagacatccttaatcaaataaaacttctaactttatgctatgattactacccttccattactctagacaaatcatgtcatcaacttggtttatctgaactacttattaggaaatattgtcatgatttaacaactttatttaacagtcaactctctctgaatatcgaaaagagtacaatagtctaccaatctaatggtgtaactagagaacaagctttcaaatatatttatcatcaatcacacgttttacaacttttaaaatttttgatcacgaatgattcaggcaggttacctttaacttactttagtgaaaaatttggactatcttgtgcaactgcttatcgcatacgaaaacatattagtccattactagaaaaacttggatttcagattgtcaaaaatactattaccggtgacgagtatcgaattcgctatttaatcgcatttttaaatgctcaatttggtatagaagtttatcccatgtctaagatggataaattgctcatcaaacgattgttattagaacactcaactacttttactgcttctcattacttcccaaatacatttattttctttgatacattgttgtctctatcatggaaacgtattaattataatgtagttgtcccttactcatcccttttcactgaactacaaaatatatttatctatgatacattacaatattgtgtcaaaaatgttattatagattcctttaaaattaatttaaaaaaagacgatatagactatatttttcttgcttaccttacttcccataactctttttctaatccaaattggactgagaagcgtatcgataatgtaatagctattttcgaaaattatcccaaattccaaaaattattacagccactcaaagatgctcttcccttatctggctcctatcatgatgagttggtaaaagttgctatcttttttttccgaacatttattttaggattaaatcaattaatccctgaaacaatttcatttccttcatggaactatcatagacatgataaattaactactattctccgaccgataattacaaattggttaagtaaaattggagaatacacgtttaaagaacaacattttcttctcctttgtactcatctagaaagaatcatcaaaaatcatattcctccgatacagatagccgtactaactacagactttattaataaccaaattttaacagaatgcttattacagagattttcttctaaaaagattcatttccacccttactatttattaactgatgatctttccaatattactaatcttaatccagacattattattaccaataaaaagctttctccctttatcaaacatgagatttcttcagagagtttaattacatatattgatctgattaatacttcagaccaaatcaatcaaatccaaaaaattatttcatcaatacaggaagaaaaatattgcaaactttttgcaaaaactaatgaaataactaatcgtagctcctataactcttaaaaattaacattaaaaagctagagcattgtgtaatgctctagctttttaatgttaatttttttgaataatataatccaacttttcaactgttttttcccatgtgaaatgttctttaattcttttagcaatattctgttgtagtttctctcttaatgccttatcttttactaataaatcaagagattcatggagtgactgagtattttcttccatgatgattcctaactcagggctatcaataacttcaactgttccaccgcgatctgttgcaataatagcacttgaaagtagaccagcttctaaaatagaggttggtaatccctctggatacattgaagggtaaacaaagatatcagtctgtgccattaaagacatagtctgttcaaagtttaatttccccaaaaagttaatctgtttggactgatatttctctttcaaatgtgctaattcaggtccgtctcctgcaatctgtaaataaacattttcagagtactgtgacatcgaaaatgcttctaagagcaattcaatgcctttttctttaataattctaccagcataagtgatgaaaatatcatcagcagatttttcaaggtaagccgtaccagcaaaatcagagcctagactttcagataccgaattataaataactcctttagcttctatattaaaatgttttaaccattcaacgcttctcttggataccgcataaaaatctggacgataatgcttaacacgcgctgtgagaagatgttcatagatagctccaaagaaatctaaaaaacgattattgacagaaaaatgacttgacccatggtctaaaacaatactaggtaaatggtgattctttgcaaaagatagcccttctagcgttgttaactgaaaacgtgtattacaaatcacaaaatcaatattttcatctgaaacatatttcatcagcgtgttgtattctcgatttttgttaataataggatagcgctgcttgacaatatttttggtcggtaaacggtaaatttttctacccttgtcttcatctataatcggtaaatcaccatgattagttgttacaataacaacacggtagccacgcttaaccaaatctgctgtcattttatctgtataacgttcaatacctccgaggaagggtagataatatcctgagaaaacagcaactgtttttaccttattttccatatttatccactttcatcaataagccatcttttaagcctttaatcatagcaactatttttttgctcttttgctcttctgctaccaacactcgaacaaattcatttcgcataaatactaaatatttgtatcgcttcttcttaccatatttttttataatatagatcgcattgcgtatcatgtaatattttcgaaatggtgaatgattcaatacatgaaaaacatggccaaattttttaactcgtgaagagtgtccaatttcgtgtaacagaccaataaaattaacctgataagtcttatatcccatctctgacagacgataattcatttcagagtcaacaaaatcaataaacatctcttctgcaaagccagatgtttcttcgaaaacgctcgttttcattaaagcagccgaagtaatacactcttcaatttctttatagtcaaattcttgcatcactaaattttcacggttcatatcttgatacaaacaagataacataccgaccttaggtaaatgaaggtaattttcataattatctatcaaatcacctaggacaaccgaatcttgatctaaagtcaagaaccaatcaaattcttgtgctactgcaaattgaccaatacagttcaaagcatatgcaattcctttattttctgttaaataatcaacagttaggtgcccctcttcattataatcggccactaattgagaaatttcctccttatttttcgagccattatctacgatgtagatatggcttacttgaggataaattgctcgaatgttctgatctaagcgttcaatattggggttaaaggtgacaatacccgctaaatatttcatgttctatgctcttttctaaaatctctaaataactgaatgactggtgctttggttataaaaacgataccgacatagatagttactgctactaaactttgaatgacataatttaccaatgatactgacatttgagtattgatataatagagtacagctccactaagagtagcagcaattaaatagcgcagcattcctcttgttaattctttaaaagtaaatacatctcttaaagagatagcttgatatagagagacaataaattcagtaataactgtagagataatagctcccatagcacctaaaattggtattaaaagtatattaagcacaacatttgccacaagtccaataactgcagacattgtgtaagcttttgtacgtcttgaagccagtagatactgtgtccctaaagcgttaccataagaaatgcaaatgatcatcaaagactcaacagccattagcggaccgacaacttcataccctttcccaaaaaagaagacagcaaatgtcgacgaaactcctaccactcccgcaatcattaacatt

SEQ ID NO: 308 - DNA, 14000 bp, S. agalactiae
ggccttgttccgatgttgatcccgataactcctggctcattaatagcctgttcgtaacgctctttaattatctctaacttagcatgggtattggtaaaattttgaaaatagactaagtatttattaacctcaggccactttctatgcatgaaatcaatttctttatagaattgttcacgaataggagcttctggagcaactatagcatcccctgaaccagaaactgtgcaaaaagtgcaccctcctctagcaactgttccgtctctgttaggacagtcaaaaccagcatctataggtaatttaaatattttttctccaaagagttctcgataataatcattaatcgcacgataacgttttttcataggataattgtatcacaattttaactaaaataacctcactactacaataaaactaaaaaagattggaacgtcagttagtcccaatcttttatttacttcactttctttaaccaatccttggctaaaaagatatacgcagttagattcaaaataccataagcaagtataaaaccagctaaaacatctgtcggaaaatgaacccctaggtaaatacgagataacccaattaaaaaaatgagcaaacccaaagtaccttggcacaacagtttccatatactcttaggcatatagtactgcaataaaataataatactcccaaatatcataaatgttcccatcgagtgcccactgggaaacgaatagccacctgcaaatactaaatgggttaaagttggtcttactctttgaaaaataagttttaaagaaagtatacatataccagagataatagcatttactgcgataaatctagcttgaggataccacttcttaaggtaacagaaagtgacgctcataatcgcaatagctatctggcttacagtattaccaatcacagtgattaacttgaaaaatcttgtagaaagatttggcaactgtcctctaacactttcttgaatagtttggtcaaatgaaattacagtgtcgggccaatatttgatgaccaatcctaaactgaaaaataagataatagcaataaatgcttgaataagtttactattttgacgagataacattagtctttttatatctttctaatattggcaaacaagccacgtaagttagatagaaaacaatcgaaattaaaattccctcaacgatattaaatggaataaccattgttaaaaggtaattgcctacaccaataaatgttctgatatcaaagttagcaaatatagcatacaaaggaatcgcaaagacatagttgagagctaccatagatacggtcaagctaactgtaccaaatagactagctttaataaaatcttttgcactctctctatttttccagaaaatagcgaaacttgctaaaaataaagctagagcaaccatattcatcggtaaaccaataaacgtttctggaccacgattagcaagtataacttttaaaagtgatcttaataagagtacaccataacttgatttcaaatcaaataaaataaaagcaactaacatcggaaggattgaaaaatcaacctttaaaaattctgctcctggtattaatggaaatgaaaccatcatcaatacaaaagataaggcagaaagaatggcgattgtcaccattttacgtgtatttgtcataaaaaaattcctccaatttaaataaattgaaagaagctccaaaggtaagcgtatgtacgcgaaaaaacctttgtcttctcccatccagactttactgtcggttgtggaatctcaccacatcagctttcgctcgcggactgatgcttcacaactgacaaataagttggaagcgattaccgccggtcgggaattacaccctgccctgaagacacctatagcataacaaaaaaaacttgcaattgcaagttttttaattactaattagtagtagtgattaaaaatcatattaataccaaattactatactgtatcgtttctttcagatttgctatttttagtttttcttaaaaagataaacaaaattcccaaaataatacaaccaagaattgtcagtcctccgccaataatcattcctgttttaggaagaaatgattgtggaaaaagcggttgtgatggtttaggatttgttggtggaggagtttctttttcgttttctacctctacttcctgtgttttattagcaactacagcaactacagcatccttcatagatatacggtaaccagttagtgcttttgcttctcgaaaaatatacttaccaggtaataaaccttcaacctcaatttctcccttatcatcagttactaatgaagtaatcccatcttgatcggtcgtaaatcgtccatttttaaagcgaactggctgattctggttatcgtataatacaaatattactccggatagccytttctttatctttccttcttttgkatatttaataagttttaatcggcctgtttcaacttttcgcttaggatttatctgtaattgatttgataacttatcatctggtaattcaatataaaaaggtactattgttgaaacgctttgatcagctttataagcacgaccaaagtacgaaccatttgggagtgctatctttgtctgaccattagtatcagtaggagaagtcaagatactcttatacttctggttcaattcgctatctgtcatttggctcaataaatcaacttttaagttgtcagtcacagtccataaacgataagaaatcccctcctctgtagtatttggctgaagtcctatctgtgtgattgttagttgattaggggtatcagcatttacactggctaccgaaaaaaacgctaattgtaccaatcctaaaaagcaacatagtagaagtcctaaactttttctaatctttttcatttttgatttccctttctttttctctctttaaattttcgttttaaatataatagtaaagcgactaatataagaataactaggattgataagaggaaataaagtttatagtgtgtttgcaattctttcattaaatagttcttttctttaacaggaggtacatacttgattcgatgccctctaactagtaaacgatgtgaattaatcgaataaggtgtacatgttagcaaagtcgcataatccttacctttaacaaccaataatttagaaaaattatctggctttacaacacttatttgatcaaccttataggctaaaacttctttgatattatgaatataaaaaatttttccttttttaagtttatctaaatctgtaaataacttagctttaggtaagccgcgatgagctgtgataacagtatgtgaactttttccaccaattggcaaagaagttccttcaaggtgtcctgctcctttttcaagaacactactggtagtccccgcatagataggtaatttttgcttgatagacggtatatcaatatatccaatcatttcagcaatctcaagcatgtgggcgtattcagcaataccttttttttctttttcagtatagggatctgataggcggcttgggtccagtgttctattataagcttttgctaactcaaatcgtctattaatctctttagcatttaatttttgggtttgattatcaaagttagttacttgattattagctttaatattatagtaccaatttgaaataaaaggatatgaggttatcaaaagaccaactaagaacaatagtatcaagcctacattcatccatcgatttaaaacgaccgatttcttaaggtttttctgaaatcttcctcccattatgattcaattccttttctaacacttgctaaacgatttttttgacgttgacgttttattaaccaaagtaaccaagcaataataactaaagatatatagaaaagatatctataaatcgtgtttaaatgaccttctttcattaatttttcatcaataggacctttataaggaatacgatgtccccttactaaaagtctgtgtgtattgaccataatcggggtgcaagtcaataaggttgcataatcatgtccaggaacaaccaataaatctgaaaagttatcgggtgtaacgacttttatctgatctacttgatatgctatcgtttcttttatgttttgaatataaaacttatctcctttttttaactttttaaggttagaaaagagttctttatctggaattcctgaatgtgctgttataacagtatgtgtactattgcctccaattggaagagaggtgccttctaaatgccctgctcctttagatagaacttcttgacttgaacctgcaaatatagggagtttttgacctatcttaggaactgaaattgtgccgattttttcacttacctctaacatacgggcgtactctgctacccctttttgaattcgttttttctcataaggatcttcaaaatggacattatttaaagaatcattataagcttgtgctagagccatacgtcgattgatttctttctgactaagttttttagcagctctctcaaaatcctgtgtttgattattggattctatcgtatagtaaaaacgtgataccactggatacaataaaatagatagacctattagaaaaagaatgataaaaggaagatttgacttcttctttttagtttttttgatgatatttttagtcttcacgtcatctcctaaataatggctcttgcttatgatctaagagtacttctactgaaatacccttagatcataagcacagctttaactgtgcttatacatcatcaaagactagccttaagcttcctctgattgacgtcttttcatgataattaccgctccaagcataatgcttaaaccaataattgtgaaaagaattgtaccaataccacctgtttgtggaatagtcacttttttgttttctatgcgttgagcgtcttttttattgctgctagcagtgtaatcaatgttacctgagtcgtctgcttttgagctgtttccaactttgaaatcaacatcacctgctaatttagcgtaaccagctggagcttgtgtttcttcaagtttataatcaccagttgcaagaccgctaacttcaaattgaccgtcagcgtttgaagtcactttaacaacgttagcatcttctttattagttacccactcgtaagctgtacgagctacgatgaaggctgcattgtaagcgtcttgagcagttttgatttctgctttagctgtttcacctttagtacctttttgatcgtctgctgaaagtttgttgtaagctgcgattttagcgtcaagagcagttttagcatttgtgtaagctgttgtttgagctgatattgtcgcagatgatttcaatgcaaggtatttaccagctgaatctttaacaacgaactgtgcaccttgcaagcgttctgtttcagtcgaacttgttttgacgaattttttaccgtgtgtcacaacttttggttcagttggattaagtggtgttgggttgtctgaatctggagtattggtgatagctgcactaccagcaccagtagtgattgtattaccataaccagcgatacgttctgagatcatgtatgttttactatcagtcagaccactgaatttaccagcaaacgctccagtaactgtaaatttaataccattacctaagttgatttcgccatttggtgttgtttttgtcaatgaaactgaggcaacagctgttccaccatctttaagggtataaacaacattcgcattctctaaatctgaacctttgtcccaagttttgctaacagtgatttcgccatttgacggtgttactgggatttcttttacttttttacctggtttgttaccgtattgaagtttgatatcattgctttctggcttgtcatcaatagccgcaccgttaactgttgcgctatatgtcaatgtgaattcaacagcttgtgtttccgcttctttttgtagcttagtcaaacctgtatctgtgaatttcaaagtgaaaccacggtcatcacgttcaacattgtaatctgtaccttctacaaaagagcctgacgatgcttctaagttaacagtgttacccattgtcaaaccatttgacatggtatcgacccaagcaaggtttttgtatttagaccctttttggatttttgttttaacttcgtaagggatttcttgaccgatttcagcagtagcttttgctttttctgcctgatatttgtcgtagtctgccccacctgcaatagctgaattatcactgtcattcaacaatttatttgctttagcaaagtttttgtcgatttgtggtgcttcttctgtattctttggatacacttcagcgtccacgacaattccttcttcgttatacaaaggaagagtgattttcactgggacagcttttgagtcagcaagaactttgtcaccatttttataattagatttgtcaagcaactcaacgatttggtatgttccttttaagtttgcagtattaaatgtaatgccgttttcagttgtcaaacctttaaggacacctgctgcatcgatactttctacttcagtaccactttctgtgatatattttgtctgactttcattcataaccgcaaagaaagcaccggcgatttctttagaaccttgcccaaaatatcctgaaatgtcagtaagtttttgacccatatacttcgttccattcaatccatttattcctgggaaatttggcttagccaaattatcggatgtttgaacaattttgtgtaaggttactgttttagtgatatttcccatctcagcagcaaataccggagctaccgataacaacgatgttaaaattaataacaatgccgagaacattgcaaaatatttgttgattcttttcatttctatctccttcttattttagttaatcaacataaataataatatacggattataatactaccgcagcaccactcctttcaaaatatatttaattaataatgctaaagcacatagttcttaatctttctcgattgatgcatcactagatttcttatgtcttttccaaatataaattccacctgcaatagacatcatagctccacctattaaaatgaaagatagaattcctttcccacctgtcatcggaataattccttttggtggaatatgcgtgttggtaattaaatgcttgtcaccttcctcatgatattcagaaatctgtttattaacagctattatattttgtatcgatcctttaacaacttcaaaagttaaaattggtttattagtaattttttgataatccttcggcgaaactgcttctattaactgatatttgccatctttcaaatctttgtaagaaattttgccgttttctcccgtcactacttttgaattattattttttattggtaaataaagtttataatcttcattaaattcttgaagttcaaatgtagctcctttgagaagcaacttattattatctttatcaacttttgtaaattcaatttcacctaacttcttctcgtttttaatcgttattgtaggatattctctcacatcacgaattttagggattggaaaatctctaagtgtatcgggttcctctgatttaggattcaatgttgttctaccattagtgtcatagaatttgttactaataaaactgtcatctagtttcacatcatatgtgagtgttactttttgcccctcccctaagttcaaacctctaacgtagagtttatttttgatgtattctaatttaacccctttaagtatcccaccatcattattaggccctccagttgcaatgctatctttcattatacttccatcatttccctgtaaagtataatcacttggttgcaatgtttgtccgttgccaagatgtaaattgattttatcacccataggatcttctatagttccattaacaattgagttttcctttgttaaaatcttttcaaattgttgctgaattttagataaaatttcattattagatacatcagctgaagttactatcggggtataatactcaggtttagaagagaatgaattcattagttctgttatttccccatctgaaagttcaaaagcttcctccttcaatttttgaaaagtaccatcttgatttttcttataatcctcattataaacttgtctaaaaccagatatatctataccaaaattaaagatgtcataatttttctgttttaaactatttatataaagtttggttggtgttccatgttctcttactggtccatttctataaattgtacctttagggtaattaagatttaaatctaaataatgaagtttttgtaagtttccagaaattatctgtgtttgataactatctaagggaaacaaaaagtaactctccccattgcctttgatcttttctggatcatcagttataaaataattatttttgtctaaataacctttttcttttattctctcaaattgatttgcgtatgttgaaccttttacaaaactattaatggcatatgatcttgttggaacaccgtcagttagatgaacaataatctttctactcttacgctgtatactacttaacaaggtatctgcctccataaaagctttcattgtaaaggtctcacctactttacttaaatcatattccctctttttttctggagttaatcctagacttgtccccccccacttagcttctggagcttctttagggatcttttttataatatcagcagcaatattagtgaactttttatagctataatcatttgtctgaactgtgaaactagtttcaagtccataataaggatcctctttaaaaccttttataactttaactgtccttccatcaaaaatatctgaaccataagtaactaaagctgctcggttttcaacatttgctcctaaaacatcttttataattgtttctactgcttcacctgccttttttgccttgttattttttccattattcttcatagaatttgaattatcaagaacaaaaacaacatccagaggttcatctttatttatagtttttattatggatttaccgctaacagttaactcaattttatatttattatgatccaaatcatttacttctgaaatacgtttagataatgttccctcttgaatttctcttatgtgctcaccttcacttgaatatggattaactgcttttgcctctaatttcccatttggaattgaatttttaacatgctcaagattataagattcttttgtatcttcataagctcctgtaaggggatactgcttatctagttcctcttgcctttgttcaattatagattttttatcatcactattttgtatcgtagtttttccattactctcaaccttaacttgccaagtctgggtagtctttttgtatccttcgggtgccgtttcttctgataaagtgtaatctccaggtgtgagattatcaaaagtagcttcacctgttacctcagtagttactttttctactttgctttctgagtgtgaagtaggttttaaaacaaaggtagcttttgaaagtggtttgttctggtcatctgtctttttaacaactaactttcctttagcaccattttccggtacggtactttcccctaaaacattggtattaagcggtatttgcgacaaacaaaaaagacttaacgtcaatattttagaaaatttttggtattttctcattttacaactcctattgtgccgaaatgtcgtttctaaatctaagatcagatacagaatatcctagaatatacaaactatcacttattatgatatcaataatttcttattataaggtatggaattttaaagttttttcccaatttttgaatgatttttctttttatttgataatcttattttttattatcttagaaatacttcaattagcttaagtagttgatttttctttttttatgttttaaaatattgcttaaaaataatgtttgagagagagtttactgaattgattgaaaattatttagaaaaagacatccttaatcaaataaaacttctaactttatgctatgattactacccttccattactctagacaaatcatgtcatcaacttggtttatctgaactacttattaggaaatattgtcatgatttaacaactttatttaacagtcaactctctctgaatatcgaaaagagtacaatagtctaccaatctaatggtgtaactagagaacaagctttcaaatatatttatcatcaatcacacgttttacaacttttaaaatttttgatcacgaatgattcaggcaggttacctttaacttactttagtgaaaaatttggactatcttgtgcaactgcttatcgcatacgaaaacatattagtccgttactagaaaaacttggatttcagattgtcaaaaatactattaccggtgacgagtatcgaattcgctatttaatcgcacatttaaatgctcgatttggtatagaagtttatcccttatctaagatggataaattgcttatcaaacgattgttattagaatactcaactacttttactgcttctcattacttcccmaatacatttattttctttgatacattattgtctctatcatggaaacgtattaattataatgtagttgtcccttactcaccccttttcattgaactacaaaatatatttatctatgatacattacaatattgtgtcaaaaatgttattatagattcctttaaaattaatttaaaaaaagacgatatagactatatttttcttgcttaccttacttcccataactctttttctaatccaaattggactgagaagcgtatcgataatgtaatagctattttcgaaaattatcccaaattccaaaaattattacagccactcaaagatgctcttcccttatctggctcctatcatgatgagttggtaaaagttgctatcttttttttccgaacatttattttaggattaaatcaattaatccctgaaacaatttcatttccttcatggaactatcatagacatgataaattaactactattctccgaccgataattacaaactggttaagtgaaattggagaatacacatttaaagaacaacattttcttctcctttgtactcatctagaaagaatcatcaaaaatcatattcctccgatacagatagccgtactaactacagactttattaataaccaaattttaacagaatgcttattacagagattttcttctaaaaagattcatttccacccttactatttattaactgatgatctttccaatattactaatcttaatccagacattattattaccaataaaaagctttctccctttatcaaacatgagatttcttcagagagtttaattacatatattgatctgattaatacttcagaccaaatcaatcaaatccaaaaaattatttcatcaatacaggaagaaaaatattgcaaactttttgcaaaaactaatgaaataactaatcgtagctcctataactcttaaaaattaacattaaaaagctagagcattgtgtaatgctctagctttttaatgttaatttttttgaataatataatccaacttttcaactgttttttcccatgtgaaatgttctttaattcttttagcaatattctgttgtagtttctctcttaatgccttatcttttactaataaatcaagagattcatggagtgactgagtattttcttccatgatgattcctaactcagggctatcaataacttcaactgttccaccgcgatctgttgcaataatagcacttgaaagtagaccagcttctaaaatagaggttggtaatccctctggatacattgaagggtaaacaaagatatcagtctgtgccattaaagacatagtctgttcaaagtttaatttccccaaaaagttaatctgtttggactgatatttctctttcaaatgtgctaattcaggtccgtctcctgcaatctgtaaataaacattttcagagtactgtgacatcgaaaatgcttctaagagcaattcaatgcctttttctttaataattctaccagcataagtgatgaaaatatcatcagcagatttttcaaggtaagccgtactagcaaaatcagagcctagactttcagataccgaattataaataactcctttagcttctatattaaaatgttttaaccattcaacgcttctcttggataccgcataaaaatctggacgataatgcttaacacgcgctgtgagaagatgttcatagatagctccaaagaaatctaaaaaacgattattgacagaaaaatgacttgacccatggtctaaaacaatactaggtaaatggtgcttctttgcaaaagatagcccttctagcgttgttaactgaaaacgtgtattacaaatcacaaaatcaatattttcatctgaaacatatttcatcagcgtgttgtattctcgatttttgttaataataggatagcgctgcttgacaatatttttggtcggtaaacggtaaatttttctacccttgtcttcatctataatcggtaaatcaccatgattagttgttacaataacaacacggtagccacgcttaaccaaatctgctgtcattttatctgtataacgttcaatacctccgaggaagggtagataatatcctgagaaaacagcaactgtttttaccttattttccatatttatccactttcatcaataagccatcttttaagcctttaatcatagcaactatttttttgctcttttgctcttctgctaccaacactcgaacaaattcatttcgcataaatactaaatatttgtatcgcttcttcttaccatatttttttataatatagatcgcattgcgtatcatgtaatattttcgaaatggtgaatgattcaatacatgaaaaacatggccaaattttttaactcgtgaagagtgtccaatttcgtgtaaaagaccaataaaattaacctgataagtcttatatcccatctctgacagacgataattcatttcagagtcaacaaaatcaataaacatctcttctgcaaagccagatgtttcttcaaaaacgctcgttttcattaaagcagccgaagtaatacactcttcaatttctttatagtcaaattcttgcataactaaatcttcacggttcatatcttgatacaaacaagataacataccgaccttaggtaaaagaaggtaattttcataattatctatcaaatcacctaggacaaccgaatcttgatctaaagtcaagaaccaatcaaattcttgtgctactgcaaattgaccgatacagttcaaagcatatgcaattcctttattttctgttaaataatcaacagttaggtgcccctcttcattataatcggccactaattgagaaatttcttccttatttttcgagccattatctacgatgtagatatggcttacttgaggataaattgctcgaatgttctgatctaagcgttcaatattggggttaaaggtgacaatacccgctaaatatttcatgttctgtgctcttttctaaaatctctaaataactgaatgactggtgctttggttataaaaacgataccgacatagatagttactgctactaaactttgaatgacataatttaccaatgatactgacatttgagtattgatataataaagtacagctccactaagagtagcagcaattaaatagcgcagcattcctcttgttaattctttaaaagtaaatacatctcttaaagagatagcttgatagagggagacaataaattcagtaataactgtagagataatagctcccatagcacctaaaattggtattaaaagtatattaagcacaacatttgccacaagtccaataactgcagacattgtgtaagcttttgtacgtcttgaagccagtagatactgtgtccctaaagcgttaccataagaaatgcaaatgatcatcaaagactcaacagccattagcggaccgacagcttcataccctttcccaaaaaagaagacggcaaa

SEQ ID NO: 309 - DNA, 14000 bp, S. agalactiae
gttgcttcataagttgtctgaaggcctaattctaaagtcacatgcattctttcagaaagttcagcgagatagtatatagtttcatcaggtaagcaatccggccttgttccgatgttgatcccgataactcctggctcattaatagcctgttcgtaacgctctttaattatctctaacttagcatgggtattggtaaaattttgaaaatagactaagtatttattaacctcgggccactttctatgcatgaaatcaatttctttatagaattgttcacgaataggagcttctggagcaactatagcatcccctgaaccagaaactgtgcaaaaagtgcatcctcctctagcaactgttccgtctctgttaggacagtcaaaaccagcatctataggtaatttaaatattttttctccaaagagttctcgataataatcattaatcgcacgataacgttttttcataggataattgtatcacaattttaactaaaataacctcactactacaataaaacttaaaaagattggaacgtcagttagtcccaatcttttatttacttcactttctttaaccaatccttggctaaaaagatatacgcagttagattcaaaataccataagcaagtataaaaccagctaaaacatctgtcggaaaatgaacccctaggtaaatacgagataacccaattaaaaaaatgagcaaacccaaaataccttggcacaacagtttccatatactcttaggcatatagtactgcaataaaataataatactcccaaatatcataaatgttcccatcgagtgcccactgggaaacgaatagccacctgcaaatactaaatgggttaaagttggtctcactctttgaaaaataagttttaaagaaagtatacatataccagagataatagcatttactgcgataaatctagcttgaggataccacttcttaaggtaacagaaagtgacgctcataatcgcaatagctatctggcttacagtattaccaatcacagtgattaacttgaaaaatcttgtagaaagatttggcaactgtcctctaacactttcttgaatgttttggtcaaatgcaattacagtgtcgggccaatatttgatgaccaatcctaaactgaaaaataagataatagcaataaatgcttgaataagtttactattttgacgagataacattagtctttttatatctttctaatattggcaaacaagccacgtaagttagatagaaaacaatcgaaattaaaattccctcaacgatattaaatggaataaccattgttaaaaggtaattgcctacaccaataaatgttctgatatcaaagttagcaaatatagcatacaaaggaatcgcaaagacatagttgagagctaccatagatacagtcaagctaactgtaccaaatagactagctttaataaaatcttttgcactctctctatttttccagaaaatagcgaaacttgctaaaaataaagctagagcaaccatattcatcggtaaaccgataaaggtttctggaccacgattagcaagtataacttttaaaagtgatcttaataagagtacaccataacttgatttcaaatcaaataaaataaaagcaactaacatcggaaggattgaaaaatcaacctttaaaaattctgctcctggtattaatggaaatgaaaccatcatcaatacaaaagataaggcagaaagaatggcgattgtcaccattttacgtgtatttgtcataaaaaaattcctccaatttaaataaattgaaagaagctccaaaggtaagcgtaggtacgcgaaaaaaacctttgtcttctcccatccagactttactgtcggttgtggaatctcaccacatcagctttcgctcgcggactgatgcttcacaactgacaaataagttggaagcgattaccgccggtcgggaattacaccctgccctgaagacacctatagcataacaaaaaaaacttgcaattgcaagttttttaattactaattagtagtagtgattaaaaatcatattaataccaaattactatgctgtatcgtttctttcagatttgctatttttagtttttcttaaaaagataaacaaaattcccaaaataatacaaccaagaattgtcagtcctccaccaataatcattcctgttttaggaagaaatgattgtggaaaaagcggttgtgatggtttaggatttgttggtggaggagtttctttttcgttttctacctctacttcctgtgttttattagcaactacagcaactacagcatccttcatagatatacggtaaccagttagtgcttttgcttctcgaaaaatatacttaccaggtaataaaccttcaacctcaatttctcccttatcatcagttactaatgaagtaatcccatcttgatcggtcgtaaatcgtccatttttaaagcgaactggctgattctggttatcgtataatacaaatattactcctgatagccttttctttatctttccttcttttgtatatttaataagttttaatcggcctgtttcaacttttcgcttaggatttatctgtaattgatttgataacttatcatctggtatttcaatataaaaaggtactattgttgaaacgctttgatcagctttataagcacgaccaaagtacgaaccatttgggagtgctatctttgtctgaccattagtatcagtaggagaagtcaagatactcttatacttctggttcaattcgctatctgtcatttggctcaataaatcaacttttaagttgtcagtcacagtccataaacgataagaaatcccctcctctgtagtatttggctgaagtcctatctgtgtgattgttagttgattaggggtatcagcatttacactggctaccgaaaaaaacgctaattgtaccaatcctaaaaagcaacatagtagaagtcctaaactttttctaatctttttcatttttgatttccctttctttttctctctttaaattttcgttttaaatataatagtaaagcgactaatataagaataactaggattgataagaggaaataaagtttatagtgtgtttgcaattctttcattaaatagttcttttctttaacaggaggtacatacttgattcgatgccctctaactagtaaacgatgtgaattaatcgaataaggtgtacatgttagcaaagtcgcataatccttacctttaacaaccaataatttagaaaaattatctggctttacaacacttatttgatcaaccttataggctaaaacttctttgatattatgaatataaaaaatttttccttttttaagtttatctaaatctgtaaataacttagctttaggtaagccgcgatgagctgtgataacagtatgtgaactttttccaccaattggcaaagaagttccttcaaggtgtcctgctcctttttcaagaacactactggtagtccccgcatagataggtaatttttgcttgatagacggtatatcaatatatccaatcatttcagtaatctcaagcatatgggcgtattcagcaataccttttttttctttttcagtatagggatctgataggcggcttgggtccagtgttctattataagcttttgctaactcaaatcgtctattaatctctttagcatttaatttttgggtttgattatcaaagttagttacttgattattagctttaatattatagtaccaatttgaaataaaaggatatgaggttatcaaaagaccaactaagaacaatagtatcaggcctacattcatccatcgatttaaaacgaccgatttcttaaggtttttctgaaattttcctcccattatgattcaattccttttctaacacttgctaaacgatttttttgacgttgacgttttattaaccaaagtaaccaagcaataataactaaagatatatagaaaagatatctataaatcgtgtttaaatgaccttctttcattaatttttcatcaataagacctttataaggaatacgatgtccccttactaaaagtctgtgtgtattgaccataatcggggtgcaagttaataaggttgcataatcatgtccaggaacaaccaacaaatctgaaaagttatcgggtgtaacgacttttatctgatctacttgatatgctatcgtttcttttatgttttgaatataaaacttatctcctttttttaactttttaaggttagaaaagagttctttatctggaattcctgagtgcgctgttataacggtatgtgtgctatttcctccaattggaagagaagtaccttctaaatgccctgctcctttagatagaacttcttgacttgaacctgcaaatatagggagtttttgacctatcttaggaactgaaattgtgccgattttttcacttacctctaacatacgggcgtactctgctacccccttttgaattcgttttttctcataaggatcttcaagatggacattatttaaagaatcattataagcttgtgctagagtcatacgacgattgatttctttctgactaagttttttagcagctctctcaaaatcctgtgtttgattattagattctatcgtatagtaaaaacgtgataccactggatacaataaaatagatagacctattagaaaaagaatgataaaaggaagatttgacttcttctttttagtttttttgttgatatttttagtcttcacgtcatctcctaaataatggctcttgcttatgatctaagagtacttctactgaaatacccttagatcataagcacagctttaactgtgcttatacaccatcaaagactagccttaagcttcctctgattgacgttttttcatgacaactactgctccaagcataatgcttaaaccaataattgtgaaaagaattgtaccaataccacctgtttgtgggatggttacttttttgttttgaacttgttgggcatctttttttacagatcctttatcatatgcgatgtcagttgtagcccctttgctatatgatgtggcagttacttcaaagtttacatcacctgacaatgtcgcataacctgctggtgcttgagtttcttccaagctataagtgcctttatccaaaccagtaatttcaaattgaccaccggcgttagagatcaatttaacaacattatcagcctttttatctgcaacccattcatatgagtagttagctttaacaaaagcgtcattgtaagctttttgtttttgatcaacagtagccaatgctgttttaccttcttggccttcttgtttttctttagtcaagtcgttataagctttaacagcttcatccaatgctagtttagcagtttttacagctgcctttgcttcagcagttgctgcacctgctttacgtgccaagtattttccttctttcttaacaaggaaggtagctcctgccaagcgttcagtgttagcttgatttgttttcacaaatttacgtccataagtcaccacttttggttctgatgggttgattggagttggatcatttgagtttttgttgttcttgatagtcacaacaccatttttaaatgatacatattctggagtgtagccgctaacacgttcgacaacgcggtaagttttagtattatccaaacctgtgaaagtatgttcaaagcgtgatggttttgttgcttcgtgtgaagcaacgttcacccatgtaccatccgtttgtttttcttgcaaggtaaagatagctttaactgcaacattaacatcagtaattgtaccatctactgcccagtctttaatgactttaatttcttggttagctggagtaccttcttgtggttcactttcttccgttgggttattaccatagtccaatttaacatcattggtttctggaacttcaacagtagtggagccgttcaccgtagctgagtaagtgatcttgatttcaacatctttgtcttttgcagcagctgctactgctgcaagacctgttgcattcaaggcaagacggaaaccttggtcatctgttacgagtttgtagtttaaaacaggaaaatctttaccatccaatgttactttaacgttgttgttgaacgtcaaacctttagtcatgctatcagtccaaaccagtttcttatagtctgagcctttaagaatttttgttccaactatgtattcttttttgtcaccaactgtcgctgagacaacacctttgtcttttcggttgtcagtataatcaagatctttatctgcaaagttcttatctacttgtggttttgtttcagtattctttggataaatgtgagcatctttaacaacaccttggttgtttaccaatggcagagtgattttaactggaactgcttttgaatcagccaagatagaaccgttgttatcgtagtttgatttttctttcaattcaacgatttggtaagttccttttaacttagcagtgttaaaagcaaaaccagtgtcttttgttaaccctgaaagaacagcaccaccttcagcatctttagcttccaaagtatcgacttccttaccattttcagtaatgaattttgtaccagtttcatttttgaaaacaaagaaagcacccttaatttctttagcatcggttgagccaaaataagatttaaggtcattaatttgtttaccaacataatcgctatcattcttaccttttgtaccttcagtaaagttatcaaatgcagcttgtggcatgacaatcttgtgcaaggtcacagtatcagttgttacgtcgtccgcaaacgctggtgcaactgagaatagtgacgttaagatcaatagcagtgtcgagaacactgtaagacatttgttgatttttttcatttctatctccttcttattctagttaatcaacatagataataatatacggattataatattaccgcagcaccactcctttcgaattatatttaattaattaagaatactaaaacacatgattcttaatctttttctctagatatatcactagatttcttatatcttttccaaatataaattccacctgcaatagacatcatagatccacctattaaaatgaaagatagaattcctttcccacctgtcatcggaataattccttttggtggaatatgcgtgttggtaattaaatgcttgtcaccttcctcatgatattcagaaatctgtttattaacagctattatattttgtatcgatcctttaacaacttcaaaagttaaaattggtttattagtaattttttgataatccttcggcgaaactgcttctattaactgatatttgccatctttcaaatctttgtaagaaattttgccgttttctcccgtcactacttttgaattattattttttattggtaaataaagtttataatcttcattaaattcttgaagttcaaacgtagctcctttgagaagcaacttattattatctttatcaacttttgtaaattcaatttcacctaacttcttctcgtttttaatcgttattgtaggatattctctcacatcacgaattttagggattggaaaatctctaagtgtattaggatcctctgatttaggattcaatgttgttctaccattagtgtcatagaatttgttacttataaaactgtcatctagtttcacatcatatgtgagtgttactttttgtccctcccctaagttcaaacctctaacgtagagtttatttttgatgtattctaatttaacccctttaagtattccaccatcattattaggcccaccagttgcaatgctatctttcattatacttccatcatttccctgtaaagtataatcacttggttgcaatgtttgtccgttgccaagctgtaaattgattttgtcacccataggatcttctatagttccattaacaattgagttttcttttgttaaaaccttttcaaattgttgctgaattttagataaaatttcattgttagatgcatcggatgaagttactatcggggtataatactcaggtttagaagagaatgacttcattagttctgttatttccccatctgaaagttcaaaagcttcctctttcaatttttgaaaagtaccatcttgatttttcttataatcctcattataaacttgtctaaaagcagatatatctataccaaaattaaagatgtcataatttttctgttttaaactatttatataaagtttggttggtgttccatgttctcttactggtccatttcgataaattgtacctttagggtaattaagatttaaatctaaataatgaagtttttgtaagtttccagagattatctgtgtttgataactatctaagggaaacaaaaagtaactctccccatttccttttatatcctcgggcttatcagtaagtagaaaattacttttatttagatatccattttttttcatttgttcaaattggctttcatatgatgcacccaatttaaaattattaatagcatatgatcttgttggaacaccatcagttatatgaacaataattttttgactatttcgatctacttgactcaaaatatcatctgcctccatgaaggctttcatagtaaatgtttcccctactttactaagatagtactgcttttgttgctctggagtaagtccgtttgtagttgatccccatttagctctaggagcttctgtaggaatcctttttataatctcttcagcattatttgttaattgtttatgactataattctctgtctgaattgtgaacttagtttgaaggccataatatttatcatcttctttaaatccttttacgacatctacactcctaccatcaaaaatatctgaaccataggtaactaatgcaaccctattatcactgtttgctcctaaaatatcttttactgcggtcccaagagcttcggcagctttcttggctttattatgcctttgaaaatttgggccatcgttattcattgagttagaattatcgagtacgaagacaacatctaacggcttttgtttgtccactggttttactatggtttttccactgacagttaactcaattttatatttattatgagctaaatcacctacttctgaaatacgtttagataatgttccctctggaatttctcttatatgctcaccttcacttgaatatgggttaactgcttttgcctctgactttccatttggaactgaacctttaacatgctcaagtttataagattcctttgtatcttcataaattcctgtggggggatactgcttatctagttcttcgtgattttgtccaattgtggaatttttatcaccactattttgtatcgtagtttttccattactctcaaccttaacttgccaagtctggttagtctttttataaccttcgggcgctgtttcttctgataaagtataatctccaggtatgagattatcaaaagtagcttcacctgttagctcagcagttactttttctattttactttctggatgagcagtagtttttaaaacaaaggtagcttttgaaagtggtttgttctggtcatctgtctttttaacaactaactttcctttagcaccattttccggtacggtactttcccctaaaacattggtattaagcggtatttgcgacaaacaaaaaagacttaacgtcaatattttagaaaatttttggtattttctcattttacaactcctattgtgccgaaatgtcgtttctaaatctaagatcagatacagaatatcctagaatatacaaactatcacttattatgatatcaataatttcttattataaggtatggaattttaaagttttttcccaatttttgaatgatttttctttttatttgataatcttattttttattatcttagaaatacttcaattagcttaagtagttgatttttctttttttatgttttaaaatattgcttaaaaataatgtttgagagagagtttactgaattgattgaaaattatttagaaaaagacatccttaatcaaataaaacttctaactttatgctatgattactacccttccattactctagacaaatcatgtcatcaacttggtttatctgaactacttattaggaaatattgtcatgatttaacaactttatttaacagtcaactctctctgaatatcgaaaagagtacaatagtctaccaatctaatggtgtaactagagaacaagctttcaaatatatttatcatcaatcacacgttttacaacttttaaaatttttgatcacgaatgattcaggcaggttacctttaacttactttagtgaaaaatttggactatcttgtgcaactgcttatcgcatacgaaaacatattagtccgttactagaaaaacttggatttaagattttcaaaaatactattaccggtgacgagtatcgaattcgctatttaatcgcacatttaaatgctcgatttggtatagaagtttatcccttatctaagatggataaattgcttatcaaacgattgttattagaatactcaactacttttactgcttctcattacttcccaaatacatttattttctttgatacattattgtctctatcatggaaacgtattaattataatgtagttgtcccttactcaccccttttcattgaactacaaaatatatttatctatgatacattacaatattgtgtcaaaaatgttattatagattcctttaaaattaatttaaaaaaagacgatatagactatatttttcttgcttaccttacttcccataactctttttctaatccaaattggactgagaagcgtatcgataatgtaatagctattttcgaaaattatcccaaattccaaaaattattacagccactcaaagatgcccttcccttatctgactcctatcatgacgagttggtaaaagttgctatcattttttcccgaacatttattttaggattaaatcaattaatccctgaaacaatttcatttccttcatggaactatcatagacatgataaattaactactattctccgaccgataattacaaattggttaagtgaaattggagaatacacgtttaaggaacaacattttcttctcctttgtgctcacctagaaagaattatcaaaaatcacattcctccgatacaaatagccgtactaactacagactttattaataacaaaattttaacagaatgtttatcacagaggttttcttctaaacagattcatttccacccttactatttattaactgatgatctttccaatattactaatcttaatccagatattattattaccaacccaaagctttcttcctttataaaacatgagatttcttcagagagtttaattacatatattgatttgattcatactccagaccagatcaatcaaatccaagaaattatttcatcaatacaagaagaaaaatattgtaaactttttgcaaaaaacaatgaaataactacccgtagctcctataactcttaaaaattaacattaaaaagctagagcattgtgtaatgctctagctttttaatgttaatttttttgaataatataatccaacttttcaactgttttttcccatgtgaaatgttctttaattcttttagcaatattctgttgtagtttctctcttaatgccttatcttttactaataaatcaagagattcatggagtgactgagtattttcttccatgatgattcctaactcagggctatcaataacttcaactgttccaccgcgatctgttgcaataatagcacttgaaagtagaccagcttctaaaatagaggttggtaatccctctggatacattgaagggtaaacaaagatatcagtctgtgccattaaagacatagtctgttcaaagtttaatttccccaaaaagttaatctgtttggactgatatttctctttcaaatgtgctaattcaggtccgtctcctgcaatctgtaaataaacattttcagagtactgtgacatcgaaaatgcttctaagagcaattcaatgcctttttctttaataattctaccagcataagtgatgaaaatatcatcagcagatttttcaaggtaagccgtaccagcaaaatcagagcctagactttcagataccgaattataaataactcctttagcttctatattaaaatgttttaaccattcaacgcttctcttggataccgcataaaaatctggacgataatgcttaacacgcgctgtgagaagatgttcatagatagctccaaagaaatctaaaaaacgattattgacagaaaaatgacttgacccatggtctaaaacaatactaggtaaatggtgattctttgcaaaagatagcccttctagcgttgttaactgaaaacgtgtattacaaatcacaaaatcaatattttcatctgaaacatatttcatcagcgtgttgtattctcgatttttgttaataataggatagcgctgcttgacaatatttttggtcggtaaacggtaaatttttctacccttgtcttcatctataatcggtaaatcaccatgattagttgttacaataacaacacggtagccacgcttaaccaaatctgctgtcattttatctgtataacgttcaatacctccgaggaagggtagataatatcctgagaaaacagcaactgtttttaccttattttccatatttatccactttcatcaataagccatcttttaagcctttaatcatagcaactatttttttgctcttttgctcttctgctaccaacactcgaacaaattcatttcgcataaatactaaatatttgtatcgcttcttcttaccatatttttttataatatagatcgcattgcgtatcatgtaatattttcgaaatggtgaatgattcaatacatgaaaaacatggccaaattttttaactcgtgaagagtgtccaatttcgtgtaacagaccaataaaattaacctgataagtcttatatcccatctctgacagacgataattcatttcagagtcaacaaaatcaataaacatctcttctgcaaagccagatgtttcttcgaaaacgctcgttttcattaaagcagccgaagtaatacactcttcaatttctttatagtcaaattcttgcatcactaaattttcacggttcatatcttgatacaaacaagataacataccgaccttaggtaaatgaaggtaattttcataattatctatcaaatcacctaggacaaccgaatcttgatctaaagtcaagaaccaatcaaattcttgtgctactgcaaattgaccgatacagttcaaagcatatgcaatccctttattttctgttaaataatcaacagttaggtgcccctcttcattataatcggctactaattgagaaatttcttccttatttttcgagccattatctacgatatagatgtggcttacttgaggataaattgctcgaatgttctgatctaagcgttcaatattggggttaaaggtgacaatacccgctaaatatttcatgttctatgctcttttctaaaatctctaaataactgaatgactggtgctttggttataaaaacgataccgacatagatagttactgctactaaactttgaatgacataatttaccaatgatactgacatttgagtattgatataatagagtacagctccactaagagtagcagcaattaaatagcgcagcattcctcttgttaattctttaaaagtaaatacatctcttaaagagatagcttgatatagggagacaataaattcagtaataactgtagagataatagctcccatagcacctaaaattggtattaaaagtatattaagcacaacatttgccacaagtccaataactgcagacattgtgtaagcttttgtacgtcttgaagccagtagatactgtgtccctaaagcgttaccataagaaatgcaaatgatcatcaaa

SEQ ID NO: 310 - DNA, 5327 bp, S. agalactiae
ttttgcaaattttattgtgatgagttttctatcataataaacattaacgacacttgaaccatcgtcttttatcatgacagaagtttctgtcctcgtattattaactttaaagccagtcggtagtttttcattaatatcttgttgtgttagcgtctgattagataaagataggcctgatcgtgttacttgccctgcgtactcatatgtcttttgcgcatcagtagcatttttattatccgttgctgattgttgccagtagtttatcgtgtaggttgtttgtgcgggcgaccaatgtgcatatagcgtcgtatccttggtcaagacttgattaaaatcaaaggctgtcccaccactagcagctgtgtaccaccctgcaaaagtataacctggccttgttggatcattaggcttaattgtcgaagcaggttggtctgttaacacacgacgaggtgcaatataggtaactcctgttgataagtcgcctgtgttgaattcaacaccgtacgattctttaaagacaggataaagacttatgtctgaagatacaggtaatgcttgaatttctgattcagaaagtggagctccattttgagttttagaccaacctacaaataataatgttgaagtgggtggtgaaactttaaatgaacttagatccgcggttccgtttcctgaactatccaatggtacttgataacgctccaaaatacttttaccagcagaatcatcatataaagttactgtcgccactttactcataaatggacgaacataaatttcttttgtctcagttacagttattggctcaccaaatttaacagggtcaccatactttccagtagtaggatcataggtataccaaccattaaaatgctctcctgctttaatcgtcggaatcccaacttctcctagagattctccatcttttataatttgatgatgaacttgcatacctgaagctgtcaggaaattataatcagttccgtcattattttgaaaatggtaagttaacctaggaacttctgtattatcctcttgaacaattgcataaatggagaatgaatctgttttaaaagcaacatcactgctagtgttcttagtttctgcagtatctttagattttaatacttctgtttgaccatcatctttaaagtgaacaactttaaggttttcatctgaagcttctaatggcttatcatagttgacctctacttttactggggcttggggttctgcttctttaccatttgactcaatagtaatgtcatagagtttgaagtttttgatttcactatcttgtttagcaacttctgtcaatgcttttttcttatagtctttaaaagtagctgaattgtcttttaattccgtcacctttaaatcagcatttttaggaatcttagcttctttggtcaaagtcactgttacagtatagtctgcacctctaaacatcaatggttcttcacggtaagcagcttcctcagaagatgatgtttctgttacactagaagcaggagtctgtggcttgctctgctcaacacttgattgagaactagatgttgatgaagttacctggctagaatttttattttctaaagtaatccccacatcatctgtcttagtttcttcaactgttattgctggtagaattaaaaaataagtcgttaaaaaagttgttaggatcatcaatgaccacatgataattttccactctttagggtgttttttcttttttaatgattcgattataaaagtttgacacttctttagcatttttgcatcctccctaaccttaattgatactactaatcttacctagaggccatattctgaaagaaattttacctacaatttgttcttctgaaacatctcctacagaagtatttcgagaatcaattgaagtttttcggttgtctcctaatacaaaaatttttttatcaggtacttgatatgggtattttatattactattaccgagtgctttatgaataacatatggttctttcaacttatgttgattcacgtaaacatccccttgagaatcaatattaacccagtctcctgactctgcaataacccgcttgactaggaccttattattgtagtaaaacgcgacaacgtctccagttttaaaatttgaaccttttactgtaaagactacatcacctgcacttaaagtcttattcattgaatgtccgtagattcttaatacaggcaaccataaaaccgcaattaaaatggctgttgaggcaaccgccatcaagatgtatatggtatttttaatgacactccaaaagcgtttctgataagttacgcgatccagttcttgagataatttatctgaactaatctgtcttttcattgtctacgcctctcttatctactaaattctttacgttttctaaataggtatctgcagctaactgagcagtctcaaaaataccactaagcattaaggaagcttcggcaatagaaccagctttgctaattttgatttttttatcatctagcgcttctttaagttgctgaatctctttctcttgtttttcaataagaagttgctgttctaacataatttctagcaagtcttttctttttaatttttttaaatcttccatcgcgattacttccttaactgaaccttaaattatcgtttagatattatatcaaagttctaacctttaaactcattttttgtcctgtgttttttctcaaaaaagtctatgctaaattaacatttttgataattttttgaaaaatctcatcgaagtcattttctttttgaaagctcgaattctaggcattaaaaagccatatatcaaattgatatatggctttttttattatttaaaacaaaagaatcaataggacaatagcgtcaatttagtgacataatctattacagattaagttctttttgaataatataatccaacttttcaactgttttttcccatgtgaaatgttctttaattcttttagcaatattctgttgtagtttctctcttaatgccttatcttttactaataaatcaagagattcatggagtgactgagtattttcttccatgatgattcctaactcagggctatcaataacttcaactgttccaccgcgatctgttgcaataatagcactcgaaagtagaccagcttctaaaatagaggttggtaatccctctggatacattgatgggtaaacaaagatatctgtctgtgccattaaagacatagtctgttcaaagtttaatttccccaaaaagttaatctgtttggactgatatttctctttcaaatgtgctaattcaggtccgtctcctgcaatctgtaaataaacattttcagagtactgtgacatcgaaaatgcttctaagagcaattcaatgcctttttctttaataattctaccagcataagtgatgaaaatatcatcagcagatttttcaaggtaagccgtgtcagcaaaatcagagcctagactttcagataccgaattataaataactcctttagcttctatattaaaatgttttaaccattcaacgcttctcttggataccgcataaaaatctggacgatagtgcttaacacgcgctgtgagaagatgttcatagatagctccaaagaaatctaaaaaacgattattgacagaaaaatgacttgacccatggtctaaaacaatactaggtaaacggtgcttctttgcaaaagatagcccttctagcgttgttaactgaaaacgtgtattacaaatcacaaaatcaatattttcatctgaaacatgtttcatcagcgtgttgtattctcgatttttgttaataataggatagcgctgcttgacaatgtttttggtcggtaaacggtaaatttttctacccttgtcttcatctataatcggtaaatcatcatgattagttgttacaataacaacacggtagccacgcttaaccaaatctgctgtcattttatctgtataacgttcaatacctccgaggaagggtagataatatcctgagaaaacagcaactgtttttaccttattttccatatttatccactttcatcaataagccatcttttaagcctttaatcatagcaactaattttttgctcttttgctcttctgctaccaacactcgaacaaattcatttcgcataaatactaaatatttgtgccgcttcttcttaccatatttttttataatataaatcgcattgcgtatcatgtaatattttcgaaatggtgaatgattcaatacatgaaaaacatggccaaattttttaactcgtgaagagtgtccaatttcgtgtaaaagaccaataaaattaacctgataagtcttatatcccatctctgacagacgataattcatttcagagtcaacaaaatcaataaacatctcttctgcaaagccagatgtttcttcaaaaacgctcgttttcattaaagcagccgaagtaatacactcttcaatttctttatagtcaaattcttgcatcactaaatcttcacggttcatatcttgatacaaacaagataacataccgaccttaggtaaatgaaggtaattttcataattatctatcaaatcacctaggacaaccgaatcttgatctaaagtcaagaaccaatcaaattcttgtgctactgcaaattgaccgatacagttcaaagcatatgcaattcctttattttctgttaaataatcaacagttaggtgcccctcttcattataatcggccactaattgagaaatttcttccttatttttcgagccattatctacgatgtagatatggcttacttgaggataaattgctcgaatgttctgatctaagcgttcaatattggggttaaaggtgacaatacccgctaaatatttcatgttctatgctcttttctaaaatctctaaataactgaatgactggtgctttggttataaaaacgataccgacatagatagttactgctactaaactttgaatgacataatttaccaatgatactgacatttgagtattgatataatagagtacagctccactaagagtagcagcaattaaatagcgcagcattcctcttgttaattctttaaaagtaaatacatctcttaaagagatagcttgatatagggagacaataaattcagtaataactgtagagataatagctcccatagcacctaaaattggtattaaaagtatattaagcacaacatttgccacaagtccaataactgcagacattgtgtaagcttttgtacgtcttgaagccagtagatactgtgtccctaaagcgttaccataagaaatgcaaatgatcatcaaa

SEQ ID NO: 311 - DNA, 13954 bp, S. agalactiae
tccacatcggtccaattaacatatgacgtggcgcatcaccagtaattcggtgaataacaatatgttttggaataatctccagttggtcacaaataatcgaaatatagtcttcttgacttaacaaacgtaaacgaccttcatggtaatctctctgcattcttgtattatgcataagatgcagaaggtgtaattttataccctgaatatcattatccgtaacacatcgacgaacattttccaccatcatatcatgtgtctcccctgggagaccatttattaggtgagaaacgatttctactttaggagctaattctcgtattctcttaacagtttttttgtaaaggtcatatgaatgtgctctatttattaatgcagaagttgcttcataagttgtctgaaggcctaattctaaagtcacatgcattctttcagaaagttcagcgagatagtatatagtttcatcaggtaagcaatccggccttgttccgatgttgatcccgataactcctggctcattaatagcctgttcgtaacgctctttaattatctctaacttagcatgggtattggtaaaattttgaaaatagactaagtatttattaacctcaggccactttctatgcatgaaatcaatttctttatagaattgttcacgaataggagcttctggagcaactatagcatcccctgaaccagaaactgtgcaaaaagtgcaccctcctctagcaactgttccatctctgttaggacagtcaaaaccagcatctataggtaatttaaatattttttctccaaagagttctcgataataatcattaatcgcacgataacgttttttcataggataattgtatcacaattttaactaaaataacctcactactacaataaaactaaaaaagattggaacgtcagttagttccaatcttttatttacttcactttctttaaccaatccttggctaaaaagatatacgcagttagattcaaaataccataagcaagtataaaaccagctaaaacatctgtcggaaaatgaacccctaggtaaatacgagataacccaattaaaaaaatgagcaaacccaaaataccttggcacaacagtttccatatactcttaggcatatagtactgcaataaaataataatactcccaaatatcataaatgttcccatcgagtgcccactgggaaacgaatagccacctgcaaatactaaatgggttaaagttggtctcactctttgaaaaataagttttaaagaaagtatacatataccagagataatagcatttactgcgataaatctagcttgaggataccacttcttaaggtaacagaaagtgacgctcataatcgcaatagctatctggcttacagtattaccaaccacagtgattaacttgaaaaatcttgtagaaagatttggcaactgtcctctaacactttcttgaatagtttggtcaaatgcgattacagtgtcgggccaatatttgatgaccaatcctaaactgaaaaataagataatagcaataaatgcttgaataagtttactattttgacgagataacattagtctttttatatctttctaatattggcaaacaagccacgtaagttagatagaaaacaatcgaaattaaaattccctcaacgatattaaatggaataaccattgttaaaaggtaattgcctacaccaataaatgttctgatatcaaagttagcaaatatagcatacaaaggaatcgcaaagacatagttgagagctaccatagatacagtcaagctaactgtaccaaataaactagctttaataaaatcttttgcactctctctatttttccagaaaatagcgaaacttgctaaaaatagagctagagcaaccatattcatcggtaaaccgataaaggtttctggaccacgattagcaagtataacttttaaaagtgatcttaataagagtacaccataacttgatttcaaatcaaataaaataaaagcaactaacatcggaaggattgaaaaatcaacctttaaaaattctgctcctggtattaatggaaatgaaaccatcatcaatacaaaagataaggcagaaagaatggcgattgtcaccattttacgtgtatttgtcataaaaaaattcctccaatttaaataaattgaaagaagctccaaaggtaagcgtaggtacgcgaaaaaaacctttgtcttctcccatccagactttactgtcggttgtggaatctcaccacatcagctttcgctcgcggactgatgcttcacaactgacaaataagttggaagcgattaccgccggtcgggaattacaccctgccctgaagacacctatagcataacaaaaaaaacttgcaattgcaagttttttaatcactaattagtagtagattgtataatattaatttttaacatcaattaattgacagcgcactaatactctagctactcctgcctttgtacaagtaaacaagcttaagtcccaatcattgtctgatgtggcagttttataaactttttcaatcgctgttggttcaataatttctctattactgattttgtagtgatagatttgccctgttgtagttgtaaaataaacatccgttcccatatctacattttttaaagcatcaaaatgataaggaaaattatgcgcacaaatcaccatgttattagttaaataagaaccataataccttgtaggcgttttagacagttgttcaaaactataattagcagctaccggtaaatgcagttttaagttcggaatatccagagttcccaagtaatctgttttatccaacttttttacaggtaattctccattttctgaaccctttacttgatgcgtaatagatttatcaagcgccttgacaatatactgagaagttaaatcagcttgatgcgcctgattaatattataccaaccccaatagattccagaacttaccagaatgattccaagtatcgctaaaaaatttgctgaatatcttctaatcacgtcttcttctccattttaaggctattattaaacacagaagtcctgacataattagtataggtattggccaccatacttgtccagtaaacgggagctttccctttgtctgatgtgctactgtaggagtaatcgtctcttcttttttaggtttagcatttaaagggctcattttctcaaatgctgtaatatcgtacttcccatccttaggtattgatagtataaagggagacattagttcataaccttgagctgttttagtctgaataaatagataaatcccttgaggaagattgttcgcaacaataccttcagccggtaaattatcaaacgtttgtaaaggttgaattttatgaacagcttttgttagtagattgacatatttggcttggttactatcaaggtttacttgtgttaaatcatcgtcttttattccaataccttgaaatggggtagttagagtaaaaacttggttaccatcaacatctttagcttgtgctacttggtaaacaagtaaattaccgccagcgataccttgattattatacttattttgtatagtaatagaacccgttttcatctgatcattggtatcagcagacacaagttgagtacttagactaaataataagagaagagttatatttaggatctttttataaatcattgttctcttcctttctcattgcttgttttaaaattttcttacgttgacgtgctctcctagttacttctaaaaagattaaaagtaaaatcaaagtaaggaaaatagcgataaatggtgcgatataaataggctctatttgtattgcctctgctaccaccaaagcgttaccattatcgtttggtacacgatgtcctctcactagtaaccgatgggtattaacaccatatggtgtacacgtcaccaaagtttggtagtctttacctttaacaatttgtaaatccctcaaatcatccggtttaactgttctgatttgatccacttgataagtatatgtttcatttaagatactgactgtccagtggtctccagcttttaacttatccaaatcagaaaaaagccttgaagagggtaaacctctatgtcctgataaaatagaatgagttgagtctcctccaattggaagactacttccttctaaatgaccaatagaagtttgaagcaccttttcacttgtaccatgataaagtggtaattttatatttatctttggaattgaaatataacccatattacccgttttatcgatagccagttgtgaattataatccaaacgctcttggtcagtcatgtgccacttcattcctgaagttttaaattgcttattatattctttggctcggttaataatttttttatagtcgttttcatccatatgcgttacgcggtcttggtaatccataatcgctcgagattggtgaaatgaattccaataattagcaagtgaaggataagccattaagcctacccccactgcaattatagtgacaagcaaaatggatactaaatgttgtcttatttttttcatatattttaaatctgtaccactttgctagcccatcttattaagaacgtaaacgacgacgagcaacaagcacgatacctgctcctattactaaaattgcacctataatgtagaaaattgttgtaccaataccacctgttgaaggcaactcagtacctttgttattttcaacagttgggttaactaaaaggttatctgaattagtcgtatcagtggctccatctcctaaaataaccttctgagagttatctaacaaattgtaacctaagggagcctttttctcaactagatagtatgtaccttctttcaagcctgtaatggtaattataccatctgctcctgttgtatattctgttgcattagcttctgtgccccattcaacgttatttgtatcgttaaagtttagaaattgacccgtagcattctttaaaacaaatatagcaccttgtaatgaagcttttgtggaaccatcaattttttttatagtaatttgaccatccctcactgttactttttgacctgggtcatcattgctagtattggggttgatggtcgcaatgtttgtattttctggtaaatcagctgaacctggtttagctccactctttaatactcctgtataagtgactgtgattgtatttattcccttataaaaaaagtcatcattagctccattttgagtatttccggttggagtattggtagctgcccacggaatagtaatcgtgaaattattattttcctctaacaggttatacttcccagttgctttttccgaaccttgagttagagttgtaatattccctgatccatcagtaatagttacttcataagatccttcgttcaaatcaactacagaagcagatggcatagtatcctttataacatattgatacactttttctgtaccatgataattgactgcattcttataagtaatagtatatttgactgtatcaccaaccgagtacgttttttgatctacagtttttccaccaccatctccccatgtcgcatcagtattcttttcatgaatagtagcatttggagttacagatgtaaccataattacagctccattattaacagtgctagaaacataataatatccatattgggaaacattaataacctcagtaccatcattatttgactcagtaacagtggaaactggtgtagtattagctgatatagatttagcccatgtcgcaatctcatttgctgacgcagtatcttttttagttacatatgttctccctccattagtagttgtcgtaaaaagagaattaaaatcagttgaagctttatactcagcttctttaccttgaggaattaaataagaagctccatctttattcgaatcagatacatttgcattatctatttctgcatcaaaaactttgtatgctttataggttgcgcctttttgagtatcttgaactgtaattgtccctgtctcagcggcaaaagctatcggcgtaactggtgatacagccataccaaatgctaaactcgccactaacagcgattgaatcattttctttttcattgaaatctttctcctaaaatcatattgatgaatgattaattcatattttttttcgatagtataatattaatcctgatggtagagctaaagctaaaccaactaggatataaatgtgtgttccaatacctccagtactaggcaattctgttcctttactgttagtaattttaaaagtatatactgtacttccatctactaaattctcttttattggtgtcgcattattaccattttgttcaaaggtaactcccgtagaaatcactaatactgacatatcatttttaggtagtaggtaccctggaggggcctttgtctctgttaggtagtattttcctactggcaaactgaggtagttattagcatccactaataacaagcctttatcgtttgtcaccagccctgaatacataggatgtgaagctttattcccattagcatctgattcataaatatcaaaaactgcacctgctaaaaaattattatcattttcgacattaactttctgtagtcgtactttttgcttgatacgtgtattggtaaagctaatatctacgtctcctgaaactgtaagggattgtaagccggtagcatcataagttttatcagcttcaccagttgctagatttttttctgtaattgactcagatactttaaattcatcgtaggcttgttcatctattgatatagaagttccataaggtactttaaattccttagtctgaccatctctcagcggaaaattctcttgttgcaacgtttcacttggattaaacaagaagtctttcgtcttatcttcatctagtccaacgacagttttacttactctgacggtgtattctttaggttgccaaacagcatataaggtatttgttgcatcagggttgttatcaatacctattgattgacctgctgtaaattccacacgtcctgtatcagctaaatccttatcatgatgccaaccaataaggttgtaacctgtccttgtaaagtattggttttcaggaattgtagttgtgctattcaactccatacgcggtgtctctacttgtgttaccacattaccattttctactctagtaccaccgttaccattatatttgattgaggtatcttctaatttgatatctcctactggaataatgacaggttttatggtgatatttttattagcatctgctaaatgggcgtcaatatcaatggaatcatatgggttataaattttaccattgtaccaccagccacggaaacgatagccatctggcattgtcggacgtctcagtaaggctgaatgggagccatcgtcataggaatcagggtcagtaggctcattacttgtttgtaattgctgaccagaagcatccaatgctggctttccatctgtaccaacagcatcattgctgtatataatatgataatctccagcctttcgccaaatagctcttaaattgatatcttgagttacagcacctgaaaagttataaggtctaatactaccatctggattaacataataccaaccgactaatttgtaagcgtcttttacgtacttgtacttagttgttgtatcaacatttgagagactagtatctgtcgtataataggcatctttagttgagtcgggatctttatctcgtgaatcatacttataataatatgtacctgaaggatcttggatataatcccttgtaatatctgtataatccggaatacgatcaccataatgcaagtctaaataggtatcatctgtttttgataattggcctccgtttggatcaatattgacacgatatgttaccttttgccaacctgcatagactttaacatcatgaggaggcatagtcgtgttaaagtcaaatacttgtgtttgtgcttggtctttataccatttaccatcccaaacataccctggtcgactaggtttaggttgaaccgttgtcgtatcgggggcataagaggacaaattttgctcatatagaacatcctttactggaaaattaggaagctctgtattatcaagcggatctaaatatttaatcttgtatgaattacgttcataccataccactaagtccaaataatctttgtgataatatccatactgatcgtaatattcatcagcgactggcacagttgtattagcactagtttgtagtggcttagcatcaaataagtaattatctggatacaagctttgatagtatttaacattaaatcctaagtatttttctgtaaaggtaaactcgtctgctccagcacctccccctacgtctgataaaaagtatttgccatctagtccttgtttatagaaagcataattttgaaattcgctgaccaacaggatacaattttatttcataaggatttgctccacgtactccactgggaagtataaactcacccaaataactcattcctgatactccagttgaagttaggtaacgccacgcacctgtcttccactgatagccattcgcagctaaagtcgtaccatatagtccagtataggtgtcggcatatgatgcactagtccaaggaaacgaagaactttgataataaacctcagagtagcccgtcttcgcaaatctcatagtcacaagttttctatcataataaacattaacgacacttgaaccatcgtcttttatcatgacagaagtttctgtcctcgtattattaactttaaagccagtcggcaattttgcattaatatcttgttgtgttagcgtctgattagataaagataggcctgatcgtgttacttgccctgcgtactcatatgtcttttgcgcatcagtagcatttttattatccgttgctgattgttgccagtagtttatcgtgtaggttgtttgtgcgggcgaccaatgtgcatatagcgtcgtatccttggtcaagacttgattaaaatcaaaggctgtcccaccactagcagctgtgtaccaccctgcaaaagtataacctggccttgttggatcattaggcttaattgtcgaagcaggttggtctgttaacacacgacgaggtgcaatataggtaactcctgttgataagtcgcctgtgttgaattcaacaccgtacgattctttaaagacaggataaagacttatgtctgaagatacaggtaatgcttgaatttctgattcagaaagtggagctccattttgagttttagaccaacctacaaataataatgttgaagtgggtggtgaaactttaaatgaacttagatccgcggttccgtttcctgaactatccaatggtacttgataacgctccaaaatacttttaccagcagaatcatcatataaagttactgtcgccactttactcataaatggacgaacataaatttcttttgtctcagttacagttattggctcaccaaatttaacagggtcaccatactttccagtagtaggatcataggtataccaaccattaaaatgctctcctgctttaatcgtcggaatcccaacttctcctagagattctccatcttttataatttgatgatgaacttgcatacctgaagctgtcaggaaattataatcagttccgtcattattttgaaaatggtaagttaacctaggaacttctgtattatcctcttgaacaattgcataaatggagaatgaatctgttttaaaagcaacatcactgctagtgttcttagtttctgcagtatctttagattttaatacttctgtttgaccatcatctttaaagtgaacaactttaaggttttcatctgaagcttctaatggcttatcatagttgacctctacttttactggggcttggggttctgcttctttaccatttgactcaatagtaatgtcatagagtttgaagtttttgatttcactatcttgtttagcaacttctgtcaatgcttttttcttatagtctttaaaagtagctgaattgtcttttaattccgtcacctttaaatcagcatttttaggaatcttagcttctttggtcaaagtcactgttacagtatagtctgcacctctaaacatcaatggttcttcacggtaagcagcttcctcagaagatgatgtttctgttacactagaagcaggagtctgtggcttgctctgctcaacacttgattgagaactagatgttgatgaagttacctggctagaatttttattttctaaagtaatccccacatcatctgtcttagtttcttcaactgttattgctggtagaattaaaaaataagtcgttaaaaaagttgttaggatcatcaatgaccacatgataattttccactctttagggtgttttttcttttttaatgattcgattataaaagtttgacacttctttagcatttttcatcctccctaaccttaattgatactactaatcttacctagaggccatattctgaaagaaattttacctacaatttgttcttctgaaacatctcctacagaagtatttcgagaatcaattgaagtttttcggttgtctcctaatacaaaaatttttttatcaggtacttgatatgggtattttatattactattaccgagtgctttatgaataacatatggttctttcaacttatgttgattcacgtaaacatccccttgagaatcaatattaacccagtctcctgactctgcaataacccgcttgactaggaccttattattgtagtaaaacgcaacaacgtctccagttttaaaatttgaaccttttactgtaaagactacatcacctgcacttaaagtcttattcattgaatgtccgtagattcttaatacaggcaaccataaaaccgcaattaaaatggctgttgaggcaaccgccatcaagatgtatatggtatttttaatgacactccaaaagcgtttctgataagttacgcgatccagttcttgagataatttatctgaactaatctgtcttttcattgtctacgcctctcttatctactaaattctttacgttttctaaataggtatctgcagctaactgagcagtctcaaaaataccactaagcattaaggaagcttcggcaatagaaccagctttgctaattttgatttttttatcatctagcgcttctttaagttgctgaatctctttctcttgtttttcaataagaagttgctgttctaacataatttctagcaagtcttttctttttaatttttttaaatcttccatcgcgattacttccttaactgaaccttaaattatcgtttagatattatatcaaagttctaacctttaaactcattttttgtcctgtgttttttctcaaaaaagtctatgctaaattaacatttttgataattttttgaaaaatctcatcgaagtcattttctttttgaaagctcgaattctaggcattaaaaacaaaagaatcaataggacaatagcatcaatttagtgacacaatctattacagattaagttctttttgaataatataatccaacttttcaactgttttttcccaggtgaaatgttctttaattcttttagcaatattctgttgtaatttctctcttaatgccttatcttttactaataaatcaagagattcatggagtgactgagtattttcttccatgatgattcctaactcagggctatcaataacttcaactgttccaccgcgatctgttgcaataatagcactcgaaagtagaccagcttctaaaatagaggttggtaatccctctggatacattgatgggtaaacaaagatatctgtctgtgccattaaagacatagtctgttcaaagtttaatttccccaaaaagttaatctgtttggactgatatttctctttcaaatgtgctaattcaggtccgtctcctgcaatctgtaaataaacattttcagagtactgtgacatcgaaaatgcttctaagagcaattcaatgcctttttctttaataattctaccagcataagtgatgaaaatatcatcagcagatttttcaaggtaagccgtaccagcaaaatcagagcctagactttcagataccgaattataaataactcctttagcttctatattaaaatgttttaaccattcaacgcttctcttggataccgcataaaaatctggacgatagtgcttaacacgcgctgtgagaagatgttcatagatagctccaaagaaatctaaaaaacgattattgacagaaaaatgacttgacccatggtctaaaacaatactaggtaaacggtgcttctttgcaaaagatagcccttctagcgttgttaactgaaaacgtgtattacaaatcacaaaatcaatattttcatctgaaacatgtttcatcagcgtgttgtattctcgatttttgttaataataggatagcgctgcttgacaatgtttttggtcggtaaacggtaaatttttctacccttgtcttcatctataatcggtaaatcaccatgattagttgttacaataacaacacggtagccacgcttaaccaaatctgctgtcattttatctgtataacgttcaatacctccgaggaagggtagataatatcctgagaaaacagcaactgtttttaccttattttccatatttatccactttcatcaataagccatcttttaagcctttaatcatagcaactaattttttgctcttttgctcttctgctaccaacactcgaacaaattcatttcgcataaatactaaatatttgtgccgcttcttcttaccatatttttttataatataaatcgcattgcgtatcatgtaatattttcgaaatggtgaatgattcaatacatgaaaaacatggccaaattttttaactcgtgaagagtgtccaatttcgtgtaaaagaccaataaaattaacctgataagtcttatatcccatctctgacagacgataattcatttcagagtcaacaaaatcaataaacatctcttctgcaaagccagatgtttcttcaaaaacgctcgttttcattaaagcagccgaagtaatacactcttcaatttctttatagtcaaattcttgcatcactaaatcttcacggttcatatcttgatacaaacaagataacataccgaccttaggtaaatgaaggtaattttcataattatctatcaaatcacctaggacaaccgaatcttgatctaaagtcaagaaccaatcaaattcttgtgctactgcaaattgaccaatacagttcaaagcatatgcaattcctttattttctgttaaataatcaacagttaggtgcccctcttcattataatcggccactaattgagaaatttcctccttatttttcgagccattatctacgatgtagatatggcttacttgaggataaattgctcgaatgttctgatctaagcgttcaatattggggttaaaggtgacaatacccgctaaatatttcatgttctatgctcttttctaaaatctctaaataactgaatgactggtgctttggttataaaaacgataccgacatagatagttactgctactaaactttgaatgacataatttaccaatgatactgacatttgagtattgatataatagagtacagctccactaagagtagcagcaattaaatagcgcagcattcctcttgttaattctttaaaagtaaatacatctcttaaagagatagcttgatatagagagacaataaattcagtaataactgtagagataatagctcccatagcacctaaaattggtattaaaagtatattaagcacaacatttgccacaagtccaataactgcagacattgtgtaagcttttgtacgtcttgaagccagtagatactgtgtccctaaagcgttaccataagaaatgcaaatgatcatcaaa

SEQ ID NO: 312 - protein, 554 aa, S. agalactiae
MKLSKKLLFSAAVLTIVAGSTVEPVAQFATGMSIVRAAEVSQERPAKTTVNIYKLQADSYKSEITSNGGIENKDGEVISNYAKLGDNVKGLQGVQFKRYKVKTDISVDELKKLTTVEAADAKVGTILEEGVSLPQKTNAQGLVVDALDSKSNVRYLYVEDLKNSPSNITKAYAVPFVLELPVANSTGTGFLSEINIYPKNVVTDEPKTDKDVKKLGQDDAGYTIGEEFKWFLKSTIPANLGDYEKFEITDKFADGLTYKSVGKIKIGSKTLNRDEHYTIDEPTVDNQNTLKITFKPEKFKEIAELLKGMTLVKNQDALDKATANTDDAAFLEIPVASTINEKAVLGKAIENTFELQYDHTPDKADNPKPSNPPRKPEVHTGGKRFVKKDSTETQTLGGAEFDLLASDGTAVKWTDALIKANTNKNYIAGEAVTGQPIKLKSHTDGTFEIKGLAYAVDANAEGTAVTYKLKETKAPEGYVIPDKEIEFTVSQTSYNTKPTDITVDSADATPDTIKNNKRPSIPNTGGIGTAIFVAIGAAVMAFAVKGMKRRTKDN

SEQ ID NO: 313 - protein, 890 aa, S. agalactiae; identical to SEQ ID NO: 11

SEQ ID NO: 314 - protein, 890 aa, S. agalactiae
MKKRQKIWRGLSVTLLILSQIPFGILVQGETQDTNQALGKVIVKKTGDNATPLGKATFVLKNDNDKSETSHETVEGSGEATFENIKPGDYTLREETAPIGYKKTDKTWKVKVADNGATIIEGMDADKAEKRKEVLNAQYPKSAIYEDTKENYPLVNVEGSKVGEQYKALNPINGKDGRREIAEGWLSKKNTGVNDLDKNKYKIELTVEGKTTVETKELNQPLDVVVLLDNSNSMNNERANNSQRALKAGEAVEKLIDKITSNKDNRVALVTYASTIFDGTEATVSKGVADQNGKALNDSVSWDYHKTTFTATTHNYSYLNLTNDANEVNILKSRIPKEAEHINGDRTLYQFGATFTQKALMKANEILETQSSNARKKLIFHVTDGVPTMSYAINFNPYISTSYQNQFNSFLNKIPDRSGILQEDFIINGDDYQIVKGDGESFKLFSDRKVPVTGGTTQAAYRVPQNQLSVMSNEGYAINSGYIYLYWRDYNWVYPFDPKTKKVSATKQIKTHGEPTTLYFNGNIRPKGYDIFTVGIGVNGDPGATPLEAEKFMQSISSKTENYTNVDDTNKIYDELNKYFKTIVEEKHSIVDGNVTDPMGEMIEFQLKNGQSFTHDDYVLVGNDGSQLKNGVALGGPNSDGGILKDVTVTYDKTSQTIKINHLNLGSGQKVVLTYDVRLKDNYISNKFYNTNNRTTLSPKSEKEPNTIRDFPIPKIRDVREFPVLTISNQKKMGEVEFIKVNKDKHSESLLGAKFQLQIEKDFSGYKQFVPEGSDVTTKNDGKIYFKALQDGNYKLYEISSPDGYIEVKTKPVVTFTIQNGEVTNLKADPNANKNQIGYLEGNGKHLITNTPKRPPGVFPKTGGIGTIVYILVGSTFMILTICSFRRKQL

SEQ ID NO: 315 - protein, 901 aa, S. agalactiae
MRKYQKFSKILTLSLFCLSQIPLNTNVLGESTVPENGAKGKLVVKKTDDQNKPLSKATFVLKTTAHPESKIEKVTAELTGEATFDNLIPGDYTLSEETAPEGYKKTNQTWQVKVESNGKTTIQNSGDKNSTIGQNQEELDKQYPPTGIYEDTKESYKLEHVKGSVPNGKSEAKAVNPYSSEGEHIREIPEGTLSKRISEVGDLAHNKYKIELTVSGKTIVKPVDKQKPLDVVFVLDNSNSMNNDGPNFQRHNKAKKAAEALGTAVKDILGANSDNRVALVTYGSDIFDGRSVDVVKGFKEDDKYYGLQTKFTIQTENYSHKQLTNNAEEIIKRIPTEAPKAKWGSTTNGLTPEQQKEYYLSKVGETFTMKAFMEADDILSQVNRNSQKIIVHVTDGVPTRSYAINNFKLGASYESQFEQMKKNGYLNKSNFLLTDKPEDIKGNGESYFLFPLDSYQTQIISGNLQKLHYLDLNLNYPKGTIYRNGPVKEHGTPTKLYINSLKQKNYDIFNFGIDISGFRQVYNEDYKKNQDGTFQKLKEEAFELSDGEITELMRSFSSKPEYYTPIVTSADTSNNEILSKIQQQFETILTKENSIVNGTIEDPMGDKINLQLGNGQTLQPSDYTLQGNDGSVMKDGIATGGPNNDGGILKGVKLEYIGNKLYVRGLNLGEGQKVTLTYDVKLDDSFISNKFYDTNGRTTLNPKSEDPNTLRDFPIPKIRDVREYPTITIKNEKKLGEIEFIKVDKDNNKLLLKGATFELQEFNEDYKLYLPIKNNNSKVVTGENGKISYKDLKDGKYQLIEAVSPEDYQKITNKPILTFEVVKGSIQNIIAVNKQISEYHEEGDKHLITNTHIPPKGIIPMTGGKGILSFILIGGAMMSIAGGIYIWKRYKKSSDMSIEKD

SEQ ID NO: 316 - protein, 901 aa, S. agalactiae; identical to SEQ ID NO: 16

SEQ ID NO: 317 - protein, 901 aa, S. agalactiae
MRKYQKFSKILTLSLFCLSQIPLNTNVLGESTVPENGAKGKLVVKKTDDQNKPLSKATFVLKTTAHPESKIEKVTAELTGEATFDNLIPGDYTLSEETAPEGYKKTNQTWQVKVESNGKTTIQNSGDKNSTIGQNQEELDKQYPPTGIYEDTKESYKLEHVKGSVPNGKSEAKAVNPYSSEGEHIREIPEGTLSKRISEVGDLAHNKYKIELTVSGKTIVKPVDKQKPLDVVFVLDNSNSMNNDGPNFQRHNKAKKAAEALGTAVKDILGANSDNRVALVTYGSDIFDGRSVDVVKGFKEDDKYYGLQTKFTIQTENYSHKQLTNNAEEIIKRIPTEAPKAKWGSTTNGLTPEQQKEYYLSKVGETFTMKAFMEADDILSQVNRNSQKIIVHVTDGVPTRSYAINNFKLGASYESQFEQMKKNGYLNKSNFLLTDKPDDIKGNGESYFLFPLDSYQTQIISGNLQKLHYLDLNLNYPKGTIYRNGPVKEHGTPTKLYINSLKQKNYDIFNFGIDISGFRQVYNEEYKKNQDGTFQKLKEEAFKLSDGEITELMRSFSSKPEYYTPIVTSADTSNNEILSKIQQQFETILTKENSIVNGTIEDPMGDKINLQLGNGQILQPSDYTLQGNDGSVMKDGIATGGPNNDGGILKGVKLEYIGNKLYVRGLNLGEGQKVTLTYDVKLDDSFISNKFYDTNGRTTLNPKSEDPNTLRDFPIPKIRDVREYPTITIKNEKKLGEIEFIKVDKDNNKLLLKGATFELQEFNEDYKLYLPIKNNNSKVVTGENGKISYKDLKDGKYQLIEAVSPEDYQKITNKPILTFEVVKGSIKNIIAVNKQISEYHEEGDKHLITNTHIPPKGIIPKTGGKGILSFILIGGAMMSIAGGIYIWKRYKKSSDMSIKKD

SEQ ID NO: 318 - protein, 901 aa, S. agalactiae
MRKYQKFSKILTLSLFCLSQIPLNTNVLGESTVPENGAKGKLVVKKTDDQNKPLSKATFVLKTTAHPESKIEKVTAELTGEATFDNLIPGDYTLSEETAPEGYKKTNQTWQVKVESNGKTTIQNSGDKNSTIGQNQEELDKQYPPTGIYEDTKESYKLEHVKGSVPNGKSEAKAVNPYSSEGEHIREIPEGTLSKRISEVGDLAHNKYKIELTVSGKTIVKPVDKQKPLDVVFVLDNSNSMNNDGPNFQRHNKAKKAAEALGTAVKDILGANSDNRVALVTYGSDIFDGRSVDVVKGFKEDDKYYGLQTKFTIQTENYSHKQLTNNAEEIIKRIPTEAPKAKWGSTTYGLTPEQQKEYYLSKVGETFTMKAFMEADDILSQVNRNSQKIIVHVTDGVPTRSYAINNFKLGASYESQFEQMKKNGYLNKSNFLLTDKPEDIKGNGESYFLFPLDSYQTQIISGNLQKLHYLDLNLNYPKGTIYRNGPVKEHGTPTKLYINSLKQKNYDIFNFGIDISGFRQVYNEEYKKNQDGTFQKLKEEAFKLSDGEITELMRSFSSKPEYYTPIVTSADTSNNEILSKIQQQFETILTKENSIVNGTIEDPMGDKINLQLGNGQTLQPSDYTLQGNDGSVMKDGIATGGPNNDGGILKGVKLEYIGNKLYVRGLNLGEGQKVTLTYDVKLDDSFISNKFYDTNGRTTLNPKSEDPNTLRDFPIPKIRDVREYPTITIKNEKKLGEIEFIKVDKDNNKLLLKGATFELQEFNEDYKLYLPIKNNNSKVVTGENGKISYKDLKDGKYQLIEAVSPEDYQKITNKPILTFEVVKGSIKNIIAVNKQISEYHEEGDKHLITNTHIPPKGIIPMTGGKGILSFILIGGAMMSIAGGIYIWKRYKKSSDMSIKKD

SEQ ID NO: 319 - protein, 901 aa, S. agalactiae
MRKYQKFSKILTLSLFCLSQIPLNTNVLGESTVPENGAKGKLVVKKTDDQNKPLSKATFVLKTTAHPESKIEKVTAELTGEATFDNLIPGDYTLSEETAPEGYKKTNQTWQVKVESNGKTTIQNSGDKNSTIGQNQEELDKQYPPTGIYEDTKESYKLEHVKGSVPNGKSEAKAVNPYSSEGEHIREIPEGTLSKRISEVGDLAHNKYKIELTVSGKTIVKPVDKQKPLDVVFVLDNSNSMNNDGPNFQRHNKAKKAAEALGTAVKDILGANSDNRVALVTYGSDIFDGRSVDVVKGFKEDDKYYGLQTKFTIQTENYSHKQLTNNAEEIIKRIPTEAPKAKWGSTTNGLTPEQQKEYYLSKVGETFTMKAFMEADDILSQVNRNSQKIIVHVTDGVPTRSYAINNFKLGASYESQFEQMKKNGYLNKSNFLLTDKPEDIKGNGESYFLFPLDSYQTQIISGNLQKLHYLDLNLNYPKGTFYRNGPVREHGTPTKLYINSLKQKNYDIFNFGIDISGFRQVYNEDYKKNQDGTFQKLKEEAFELSDGEITELMKSFSSKPEYYTPIVTSSDASNNEILSKIQQQFEKILTKENSIVNGTIEDPMGDKINLQLGNGQTLQPSDYTLQGNDGSIMKDSIATGGPNNDGGILKGVKLEYIKNKLYVRGLNLGEGQKVTLTYDVKLDDSFISNKFYDTNGRTTLNPKSEDPNTLRDFPIPKIRDVREYPTITIKNEKKLGEIEFTKVDKDNNKLLLKGATFELQEFNEDYKLYLPIKNNNSKVVTGENGKISYKDLKDGKYQLIEAVSPKDYQKITNKPILTFEVVKGSIQNIIAVNKQISEYHEEGDKHLITNTHIPPKGIIPMTGGKGILSFILIGGSMMSIAGGIYIWKRYKKSSDISREKD

SEQ ID NO: 320 - protein, 896 aa, S. agalactiae
MRKYQKFSKILTLSLFCLSQIPLNTNVLGESTVPENGAKGKLVVKKTDDQNKPLSKATFVLKPTSHSESKVEKVTAELTGEATFDNLTPGDYTLSEETAPEGYKKTTQTWQVKVESNGKTTIQNSDDKKSIIEQRQEELDKQYPLTGAYEDTKESYNLEHVKNSIPNGKLEAKAVNPYSSEGEHIREIQEGTLSKRISEVNDLDHNKYKIELTVSGKSIIKTINKDEPLDVVFVLDNSNSMKNNGKHNKAKKAAEALGTAVKDILGANSDNRVALVTYGSDIFDGRSVDVVKGFKEDPYYGLETSFTVQTNDYSYKKFTNIAADIIKKIPKEAPEAKWGGTSLGLTPEKKREYDLSKVGETFTMKAFMEADTLLSSIQRKSRKIIVHLTDGVPTRSYAINSFVKGSTYESQFERIKEKGYLDKNNYFITDDPEKIKGNGESYFLFPLDSYQTQIISGNLQKLHYLDLNLNYPKGTIYRNGPVREHGTPTKLYINSLKQKNYDIFNFGIDISGFRQVYNEDYKKNQDGTFQKLKEEAFELSDGEITELMNSFSSKPEYYTPIVTSADVSNNEILSKIQQQFEKILTKENSIVNGTIEDPMGDKINLHLGNGQTLQPSDYTLQGNDGSIMKDSIATGGPNNDGGILKGVKLEYIKNKLYVRGLNLGEGQKVTLTYDVKLDDSFISNKFYDTNGRTTLNPKSEEPDTLRDFPIPKIRDVREYPTITIKNEKKLGEIEFTKVDKDNNKLLLKGATFELQEFNEDYKLYLPIKNNNSKVVTGENGKISYKDLKDGKYQLIEAVSPKDYQKITNKPILTFEVVKGSIQNIIAVNKQISEYHEEGDKHLITNTHIPPKGIIPMTGGKGILSFILIGGAMMSIAGGIYIWKRHKKSSDASIEKD

SEQ ID NO: 321 - protein, 901 aa, S. agalactiae
MRKYQKFSKILTLSLFCLSQIPLNTNVLGESTVPENGAKGKLVVKKTDDQNKPLSKATFVLKTTAHPESKIEKVTAELTGEATFDNLIPGDYTLSEETAPEGYKKTNQTWQVKVESNGKTTIQNSGDKNSTIGQNHEELDKQYPPTGIYEDTKESYKLEHVKGSVPNGKSEAKAVNPYSSEGEHIREIPEGTLSKRISEVGDLAHNKYKIELTVSGKTIVKPVDKQKPLDVVFVLDNSNSMNNDGPNFQRHNKAKKAAEALGTAVKDILGANSDNRVALVTYGSDIFDGRSVDVVKGFKEDDKYYGLQTKFTIQTENYSHKQLTNNAEEIIKRIPTEAPRAKWGSTTNGLTPEQQKQYYLSKVGETFTMKAFMEADDILSQVDRNSQKIIVHITDGVPTRSYAINNFKLGASYESQFEQMKKNGYLNKSNFLLTDKPEDIKGNGESYFLFPLDSYQTQIISGNLQKLHYLDLNLNYPKGTIYRNGPVREHGTPTKLYINSLKQKNYDIFNFGIDISAFRQVYNEDYKKNQDGTFQKLKEEAFELSDGEITELMKSFSSKPEYYTPIVTSSDASNNEILSKIQQQFEKVLTKENSIVNGTIEDPMGDKINLQLGNGQTLQPSDYTLQGNDGSIMKDSIATGGPNNDGGILKGVKLEYIKNKLYVRGLNLGEGQKVTLTYDVKLDDSFISNKFYDTNGRTTLNPKSEDPNTLRDFPIPKIRDVREYPTITIKNEKKLGEIEFTKVDKDNNKLLLKGATFELQEFNEDYKLYLPIKNNNSKVVTGENGKISYKDLKDGKYQLIEAVSPKDYQKITNKPILTFEVVKGSIQNIIAVNKQISEYHEEGDKHLITNTHIPPKGIIPMTGGKGILSFILIGGSMMSIAGGIYIWKRYKKSSDISREKD

SEQ ID NO: 322 - protein, 237 aa, S. agalactiae
MIVRLIKLLDKLINVIVLCFFFLCLLIAALGIYDALTVYQGANATNYQQYKKKGVQFDDLLAINSDVMAWLTVKGTHIDYPIVQGENNLEYINKSVEGEYSLSGSVFLDYRNKVTFEDKYSLIYAHHMAGNVMFGELPNFRKKSFFNKHKEFSIETKTKQKLKINIFACIQTDAFDSLLFNPIDVDISSKNEFLNHIKQKSVQYREILTTNESRFVALSTCEDMTTDGRIIVIGQIQ

SEQ ID NO: 323 - protein, 241 aa, S. agalactiae; identical to SEQ ID NO: 68

SEQ ID NO: 324 - protein, 241 aa, S. agalactiae
MMMTIVQVINKAIDTLILIFCLVVLFLAGFGLWDSYHLYQQADASNFKKFKTAQQQPKFEDLLALNEDVIGWLNIPGTHIDYPLVQGKTNLEYINKAVDGSVAMSGSLFLDTRNHNDFTDDYSLIYGHHMAGNAMFGEIPKFLKKDFFNKHNKAIIETKERKKLTVTIFACLKTDAFDQLVFNPNAITNQDQQKQLVDYISKRSKQFKPVKLKHHTKFVAFSTCENFSTDNRVIVVGTIQE

SEQ ID NO: 325 - protein, 241 aa, S. agalactiae; identical to SEQ ID NO: 115

SEQ ID NO: 326 - protein, 241 aa, S. agalactiae
MMMTIVQVINKAIDTLILIFCLVVLFLAGFGLWDSYHLYQQADASNFKKFKTAQQQPKFEDLLALNEDVIGWLNIPGTHMDYPLVQGKTNLEYINKAVDGSVAMSGSLFLDTRNHNDFTDDYSLIYGHHMAGNAMFGEIPKFLKKDFFNKHNKAIIETKERKKLTVTIFACLKTDAFDQLVFNPNAITNQDQQRQLVDYISKRSKQFKPVKLKHHTKFVAFSTCENFSTDNRVIVVGTIQE

SEQ ID NO: 327 - protein, 241 aa, S. agalactiae; identical to SEQ ID NO: 247

SEQ ID NO: 328 - protein, 756 aa, S. agalactiae; identical to SEQ ID NO: 109

SEQ ID NO: 329 - protein, 523 aa, S. agalactiae
LQKRDKTNYGSANNKRRQTTIGLLKVFLTFVALIGIVGFSIRAFGAEEKSTETKKTSVIIRKYAEGDYSKLLEGATLRLTGEDIPDFQEKVFQSNGTGEKIELSNGTYTLTETSSPDGYKITEPIKFRVVNKKVFIVQKDGSQVENPNKELGSPYTIEAYNDFDEFGLLSTQNYAKFYYGKNYDGSSQIVYCFNANLKSPPDSEDHGATINPDFTTGDIRYSHIAGSDLIKYANTARDEDPQLFLKHVKKVIENGYHKKGQAIPYNGLTEAQFRAATQLAIYYFTDSVDLTKDRLKDFHGFGDMNDQTLGVAKKIVEYALSDEDSKLTNLDFFVPNNSKYQSLIGTEYHPDDLVDVIRMEDKKQEVIPVTHSLTVQKTVVGELGDKTKGFQFELELKDKTGQPIVNTLKTNNQDLVAKDGKYSFNLKHGDTIRIEGLPTGYSYTLKETEAKDYIVTVDNKVSQEAQSASENVTADKEVTFENRKDLVPPTGLTTDGAIYLWLLLLVPFGLLVWLFGRKGLKND

SEQ ID NO: 330 - protein, 744 aa, S. agalactiae; identical to SEQ ID NO: 57

SEQ ID NO: 331 - protein, 744 aa, S. agalactiae; identical to SEQ ID NO: 57

SEQ ID NO: 332 - protein, 556 aa, S. agalactiae
MQKRDKTNYGSANNKRRQTTIGLLKVFLTFVALIGIVGFSIRAFGAEEQSTFQNLLSAEYVPDTPPKPGEEPPAKTEKTETKKTSVIIRKYAEGDYSKLLEGATLKLAQIEGSGFQEQSFESSTSGQKLQLSDGTYILTETKSPDFNNQGYEIAEPITFKVTAGKVFIKGKDGQFVENQNKEVAEPYSVTAYNDFDDSGFINPKTFTPYGKFYYAKNANGTSQVVYCFNVDLHSPPDSLDKGETIDPDFNEGKEIKYTHILGADLFSYANNPRASTNDELLSQVKKVLEKGYRDDSTTYANLTSVEFRAATQLAIYYFTDSVDLDNLADYHGFGALTTEALNATKEIVAYAEDRANLPNISNLDFYVPNSNKYQSLIGTQYHPESLVDIIRMEDKQAPIIPITHKLTISKTVTGTIADKKKEFNFEIHLKSSDGQAISGTYPTNSGELTVTDGKATFTLKDGESLIVEGLPSGYSYEITETGASDYEVSVNGKNAPDGKATKASVKEDETITFENRKDLVPPTGLTTDGAIYLWLLLLVLLGLWVWLIGRKGLKND

SEQ ID NO: 333 - protein, 762 aa, S. agalactiae; identical to SEQ ID NO: 48

SEQ ID NO: 334 - protein, 698 aa, S. agalactiae; identical to SEQ ID NO: 107

SEQ ID NO: 335 - protein, 627 aa, S. agalactiae; identical to SEQ ID NO: 42

SEQ ID NO: 336 - protein, 655 aa, S. agalactiae
MTQKNSYKLSFLLSLTGFILGLLLVFIGLSGVSVGHAETRNGANKQGAFEIKKNKSQEEYNYEVYDNRNILQDGEHKLEIKRVDGTGKTYQGFCFQLTKNFPTAQGVSKKLYKKLSSSDEETLKQYASKYTSNRRGDTSGNLKKQIAKVLTEGYPTNKSDWLNGLTENEKIEVTQDAIWYFTETTVPADRSYTNRNVNSQKMKEVYQKLIDTTDIDKYEDVQFDLFVPQDTNLQAVISVEPVIESLPWTSLKPIAQKDITAKKQEISVTWTNQLVTDEKGMAYIYSVKEVDKNGELLEPKDYIKKEDGLTVTNTYVKPTSGHYDIEVTFGNGHIDITEDTTPDIVSGENQMKQIEGEDSKPIDEVTENNLIEFGKNTMPGEEDGTNSNKYEEVEDSRPVDTLSGLSSEQGQSGDMTIEEDSATHIKFSKRDIDGKELAGATMELRDSSGKTISTWISDGQVKDFYLMPGKYTFVETAAPDGYEIATAITFTVNEQGQVTVNGKATKGDAHIVMVDAYKPTKGSGQVIDIEEKLPDEQGHSGSTTEIEDSKSSDVIIGGQGQIVETTEDTQTGMHGDSGCKTEVEDTKLVQSFHFDNKESESNSEIPKKDKPKSNTSLPATGEKQHNMFFWMVTSCSLISSVFVISLKTKKRLSSC

SEQ ID NO: 337 - protein, 696 aa, S. agalactiae; identical to SEQ ID NO: 79

SEQ ID NO: 338 - protein, 733 aa, S. agalactiae; identical to SEQ ID NO: 71

SEQ ID NO: 339 - protein, 611 aa, S. agalactiae
MSSSDEETLKQYASKYTSNRRGDTSGNLKKQIAKVLTEGYPTNKSDWLNGLTENEKIEVTQDAIWYFTETTVPADRSYTNRNVNSQKMKEVYQKLIDTTDIDKYEDVQFDLFVPQDTNLQAVISVEPVIESLPWTSLKPIAQKDITAKKIWVDAPKEKPIIYFKLYRQLPGEKEVAVDDAELKQINSEGQQEISVTWTNQLVTDEKGMAYIYSVKEVDKNGELLEPKDYIKKEDQIEGEDSKPIDEVTENNLIEFGKNTMPGEEDGTNSNKYEEVEDSRPVDTLSGLSSEQGQSGDMTIEEDSATHIKFSKRDIDGKELAGATMELRDSSGKTISTWISDGQVKDFYLMPGKYTFVETAAPDGYEVATAITFTVNEQGQVTVNGKATKGDAHIVMVDAYKPTKGSGQVIDIEEKLPDEQGHSGSTTEIEDSKSSDVIIGGQGEVVDTTEDTQSGMTGHSGSTTEIEDSKSSDVIIGGQGEVVDTTEDTQSGMTGHSGSTTKIEDSKSSDVIVGGQGQIVETTEDTQTGMHGDSGRKTEVEDTKLVQSFHFDNKEPESNSEIPKKDKSKSNTSLPATGEKQHNKFFWMVTSCSLISSVFVISLKSKKRLSSC

SEQ ID NO: 340 - protein, 1161 aa, S. agalactiae; identical to SEQ ID NO: 121

SEQ ID NO: 341 - protein, 285 aa, S. agalactiae
MKKNKLLLATAILATALGTASLNQNVKAETAGVVSSGQLTIKKSITNFNDDTLLMPKTDYTFSVNPDSAATGTESNLPIKPGIAVNNQDIKVSYSNTDKTSGKEKQVVVDFMKTKEPIQFNNSFETTSLKIEKEVTGNTGDHKKAFTFTLTLQPNEYYEASSVVKIEENGQTKDVKIGEAYKFTLNDSQSVILSKLPVGINYKVEEAEANQGGYTTTATLKDGEKLSTYNLGQEHKTDKTADEIVVTNNRDTQVPTGVVGTLAPFAVLSIVAIGGVIYITKRKKA

SEQ ID NO: 342 - protein, 352 aa, S. agalactiae
LEREKMKKNKLLLATAILATALGTASLNQNVKAETAGVVTGKSLQVTKTMTYDDEEVLMPETAFTFTIEPDMTASGKEGSLDIKNGIVEGLDKQVTVKYKNTDKTSQKTKIAQFDFSKVKFPAIGVYRYMVSEKNDKKDGITYDDKKWTVDVYVGNKANNEEGFEVLYIVSKEGTSSTKKPIEFTNSIKTTSLKIEKQITGNAGDRKKSFNFTLTLQPSEYYKTGSVVKIEQDGSKKDVTIGTPYKFTLGHGKSVMLSKLPIGINYYLSEDEANKDGYTTTATLKEQGKEKSSDFTLSTQNQKTDESADEIVVTNKRDTQVPTGVVGTLAPFAVLSIVAIGGVIYITKRKKA

SEQ ID NO: 343 - protein, 344 aa, S. agalactiae; identical to SEQ ID NO: 59

SEQ ID NO: 344 - protein, 349 aa, S. agalactiae; identical to SEQ ID NO: 67

SEQ ID NO: 345 - protein, 344 aa, S. agalactiae; identical to SEQ ID NO: 75

SEQ ID NO: 346 - protein, 340 aa, S. agalactiae; identical to SEQ ID NO: 50

SEQ ID NO: 347 - protein, 183 aa, S. agalactiae; identical to SEQ ID NO: 61

SEQ ID NO: 348 - protein, 189 aa, S. agalactiae; identical to SEQ ID NO: 69

SEQ ID NO: 349 - protein, 189 aa, S. agalactiae; identical to SEQ ID NO: 117

SEQ ID NO: 350 - protein, 224 aa, S. agalactiae
LLFQRVKIFLLTIVLSLSVLFKNNERRRLLRKYWKMLFSVVMILTMLAFNQTVLAKDSTVQTSISVENVLERAGDSTPFSVALESIDAMKTIDEITIAGSGKASFSPLTFTTVGQYTYRVYQKPSQNKDYQADTTVFDVLVYVTYDEDGTLVAKVISRRAGDEEKSAITFKPKRLVKPIPPRQPNIPKTPLPLAGEVKSLLGILSIVLLGLLVLLYVKKLKSRL

SEQ ID NO: 351 - protein, 195 aa, S. agalactiae; identical to SEQ ID NO: 77

SEQ ID NO: 352 - protein, 1036 aa, S. agalactiae; identical to SEQ ID NO: 44

SEQ ID NO: 353 - protein, 1161 aa, S. agalactiae; identical to SEQ ID NO: 121

SEQ ID NO: 354 - protein, 611 aa, S. agalactiae; identical to SEQ ID NO: 339

SEQ ID NO: 355 - protein, 340 aa, S. agalactiae; identical to SEQ ID NO: 50

SEQ ID NO: 356 - protein, 467 aa, S. agalactiae
NRRETVREKILITAKKLMLACLAILAVVGLGMTRVSALSKDDTAQLKITNIEGGPTVTLYKIGEGVYNTNGDSFINFKYAEGVSLTETGPTSQEITTIANGINTGKIKPFSTENVSISNGTATYNARGASVYIALLTGATDGRTYNPILLAASYNGEGNLVTKNIDSKSNYLYGQTSVAKSSLPSITKKVTGTIDDVNKKTTSLGSVLSYSLTFELPSYTKEAVNKTVYVSDNMSEGLTFNFNSLTVEWKGKMANITEDGSVMVENTKIGIAKEVNNGFNLSFIYDSLESISPNISYKAVVNNKAIVGEEGNPNKAEFFYSNNPTKGNTYDNLDKKPDKGNGITSKEDSKIVYTYQIAFRKVDSVSKTPLIGAIFGVYDTSNKLIDIVTTNKNGYAISTQVSSGKYKIKELKAPKGYSLNTETYEITANWVTATVKTSANSKSTTYTSDKNKATDNSEQVGWLKNGI

SEQ ID NO: 357 - protein, 100 aa, S. agalactiae
MTRTNYQKKRMTCPVETEDITYRRKKIKGRRQAILAQFEPELVHHELIGDSCTCPDCHGTLTEIGSVVQRQELVFIPAQLKRINHVQHAYKCQTCSDNSL

SEQ ID NO: 358 - protein, 556 aa, S. agalactiae; identical to SEQ ID NO: 332

SEQ ID NO: 359 - protein, 301 aa, S. agalactiae
HIAGRDLFKYTVKPRDTDPDTFLKHIKKVIEKGYREKGQAIEYSGLTETQLRAATQLAIYYFTDSAELDKDKLKDYHGFGDMNDSTLAVAKILVEYAQDSNPPQLTDLDFFIPNNNKYQSLIGTQWHPEDLVDIIRMEDKKEVIPVTHNLTLRKTVTGLAGDRTKDFHFEIELKNNKQELLSQTVKTDKTNLEFKDGKATINLKHGESLTLQGLPEGYSYLVKETDSEGYKVKVNSQEVANATVSKTGITSDETLAFENNKEPVVPTGVDQKINGYLALIVIAGISLGIWGIHTIRIRKHD

SEQ ID NO: 360 - protein, 344 aa, S. agalactiae; identical to SEQ ID NO: 59

SEQ ID NO: 361 - protein, 349 aa, S. agalactiae; identical to SEQ ID NO: 67

SEQ ID NO: 362 - protein, 189 aa, S. agalactiae; identical to SEQ ID NO: 117

SEQ ID NO: 363 - protein, 117 aa, S. agalactiae
ITIAGSGKASFSPLTFTTVGQYTYRVYQKPSQNKDYQADTTVFDVLVYVTYDEDGTLVAKVISRRAGDEEKSAITFKPKRLVKPIPPRQPNIPKTPLPLAGEVKSLLGILSIVLLGL

SEQ ID NO: 364 - protein, 183 aa, S. agalactiae; identical to SEQ ID NO: 61

SEQ ID NO: 365 - protein, 467 aa, S. agalactiae; identical to SEQ ID NO: 356

SEQ ID NO: 366 - protein, 350 aa, S. agalactiae
EKEVAVDDAELKQINSEGQQEISVTWTNQLVTDEKGMAYIYSVKEVDKNGELLEPKDYIKKEDGLTVTNTYVKPTSGHYDIEVTFGNGHIDITEDTTPDIVSGENQMKQIEGEDSKPIDEVTENNLIEFGKNTMPGEEDGTNSNKYEEVEDSRPVDTLSGLSSEQGQSGDMTIEEDSATHIKFSKRDIDGKELAGATMELRDSSGKTISTWISDGQVKDFYLMPGKYTFVETAAPDGYEIATAITFTVNEQGQVTVNGKATKGDAHIVMVDAYKPTKGSGQVIDIEEKLPDEQGHSGSTTEIEDSKSSDVIIGGQGQIVETTEDTQTGMHGDSGCKTEVEDTKLVQSFHF

SEQ ID NO: 367 - protein, 655 aa, S. agalactiae; identical to SEQ ID NO: 336

SEQ ID NO: 368 - protein, 611 aa, S. agalactiae; identical to SEQ ID NO: 339

SEQ ID NO: 369 - protein, 396 aa, S. agalactiae
EKEVAVDDAELKQINSEGQQEISVTWTNQLVTDEKGMAYIYSVKEVDKNGELLEPKDYIKKEDGLTVTNTYVKPTSGHYDIEVTFGNGHIDITEDTTPDIVSGENQMKQIEGEDSKPIDEVTENNLIEFGKNTMPGEEDGTNSNKYEEVEDSRPVDTLSGLSSEQGQSGDMTIEEDSATHIKFSKRDIDGKELAGATMELRDSSGKTISTWISDGQVKDFYLMPGKYTFVETAAPDGYEVATAITFTVNEQGQVTVNGKATKGDAHIVMVDAYKPTKGSGQVIDIEEKLPDEQGHSGSTTEIEDSKSSDVIIGGQGEVVDTTEDTQSGMTGHSGSTTKIEDSKSSDVIVGGQGQIVETTEDTQTGMHGDSGRKTEVEDTKLVQSFHFDNKEPESNS

SEQ ID NO: 370 - protein, 334 aa, S. agalactiae
ATALGTASLNQNVKAETAGVVTGKSLQVTKTMTYDDEEVLMPETAFTFTIEPDMTASGKEGSLDIKNGIVEGLDKQVTVKYKNTDKTSQKTKIAQFDFSKVKFPAIGVYRYMVSEKNDKKDGITYDDKKWTVDVYVGNKANNEEGFEVLYIVSKEGTSSTKKPIEFTNSIKTTSLKIEKQITGNAGDRKKSFNFTLTLQPSEYYKTGSVVKIEQDGSKKDVTIGTPYKFTLGHGKSVMLSKLPIGINYYLSEDEANKDGYTTTATLKEQGKEKSSDFTLSTQNQKTDESADEIVVTNKRDTQVPTGVVGTLAPFAVLSIVAIGGVIYITKRKKA

SEQ ID NO: 371 - protein, 285 aa, S. agalactiae; identical to SEQ ID NO: 341

SEQ ID NO: 372 - protein, 1161 aa, S. agalactiae; identical to SEQ ID NO: 121

SEQ ID NO: 373 - protein, 344 aa, S. agalactiae; identical to SEQ ID NO: 59

SEQ ID NO: 374 - protein, 349 aa, S. agalactiae; identical to SEQ ID NO: 67

SEQ ID NO: 375 - protein, 340 aa, S. agalactiae
VWYYSDNAPISNPDESFKRESESNLVSTSQLSLMRQALKQLIDPNLATKMPKQVPDDFQLSIFESEDKGDKYNKGYQNLLSGGLVPTKPPTPGDPPMPPNQPQTTSVLIRKYAIGDYSKLLEGATLQLTGDNVNSFQARVFSSNDIGERIELSDGTYTLTELNSPAGYSIAEPITFKVEAGKVYTIIDGKQIENPNKEIVEPYSVEAYNDFEEFSVLTTQNYAKFYYAKNKNGSSQVVYCFNADLKSPPDSEDGGKTMTPDFTTGEVKYTHIAGRDLFKYTVKPRDTDPDTFLKHIKKVIEKGYREKGQAIEYSGLTETQLRAATQLAIYYFTDSAELDK

SEQ ID NO: 376 - protein, 340 aa, S. agalactiae; identical to SEQ ID NO: 50

SEQ ID NO: 377 - protein, 384 aa, S. agalactiae
PKNANGYMDKIEPLNAILVTQQAVWYYSDSSYGNIKTLWASELKDGKIDFEQVKLMREAYSKLISDDLEETSKNKLPQGSKLNIFVPQDKSVQNLLSAEYVPESPPAPGQSPEPPVQTKKTSVIIRKYAEGDYSKLLEGATLRLTGEDILDFQEKVFQSNGTGEKIELSNGTYTLTETSSPDGYKIAEPIKFRVVNKKVFIVQKDGSQVENPNKEVAEPYSVEAYSDMQDSNYINPETFTPYGKFYYAKNKDKSSQVVYCFNADLHSPPESEDGGGTIDPDISTMKEVKYTHTAGSDLFKYALRPRDTNPEDFLKHIKKVIEKGYNKKGDSYNGLTETQFRAATQLAIYYFTDSTDLKTLKTYNNGKGYHGFESMDEKTLAVTK

SEQ ID NO: 378 - protein, 1036 aa, S. agalactiae; identical to SEQ ID NO: 44

SEQ ID NO: 379 - protein, 174 aa, S. agalactiae
TASINIEVINQVDVATNKQSSDIDETFMFVIEALDKESPLPNSVTTSVKGNGKTSFEQLTFSEVGQYHYKIHQLLGKNSQYHYDETVYEVVIYVLYNEQSGALETNLVSNKLGETEKSELIFKQEYSEKTPEPHQPDTTEKEKPQKKRNGILPSTGEMVSYVSALGIVLVATIT

SEQ ID NO: 380 - protein, 344 aa, S. agalactiae; identical to SEQ ID NO: 75

SEQ ID NO: 381 - protein, 215 aa, S. agalactiae; identical to SEQ ID NO: 52

SEQ ID NO: 382 - protein, 195 aa, S. agalactiae; identical to SEQ ID NO: 77

SEQ ID NO: 383 - protein, 189 aa, S. agalactiae; identical to SEQ ID NO: 69

SEQ ID NO: 384 - protein, 189 aa, S. agalactiae; identical to SEQ ID NO: 117

SEQ ID NO: 385 - protein, 183 aa, S. agalactiae; identical to SEQ ID NO: 61

SEQ ID NO: 386 - protein, 180 aa, S. agalactiae
LMPKADYTFKVEADDNAKGKTKDGLDIKPGVIDGLENTKTIHYGNSDKTTAKEKSVNFDFANVKFPGVGVYRYTVSEVNGNKAGIAYDSQQWTVDVYVVNREDGGFEAKYIVSTEGGQSDKKPVLFKNFFDTTSLKVTKKVTGNTGEHQRSFSFTLLLTPNECFEKGQVVNILQGGETKK

SEQ ID NO: 387 - protein, 340 aa, S. agalactiae; identical to SEQ ID NO: 50

SEQ ID NO: 388 - protein, 178 aa, S. agalactiae
SVNPDSAATGTESNLPIKPGIAVNNQDIKVSYSNTDKTSGKEKQVVVDFMKVTFPSVGIYRYVVTENKGTAEGVTYDDTKWLVDVYVGNNEKGGLEPKYIVSKKGDSATKEPIQFNNSFETTSLKIEKEVTGNTGDHKKAFTFTLTLQPNEYYEASSVVKIEENGQTKDVKIGEAYKF

SEQ ID NO: 389 - protein, 627 aa, S. agalactiae; identical to SEQ ID NO: 42

SEQ ID NO: 390 - protein, 109 aa, S. agalactiae
IETEDTKEPEVLMGGQSESVEFTKDTQTGMSGFSETATVVEDTRPKLVFHFDNNEPKVEENREKPTKNITPILPATGDIENVLAFLGILILSVLSIFSLLKNKQSNKKV

SEQ ID NO: 391 - protein, 98 aa, S. agalactiae
VLMGGQSESVEFTKDTQTGMSGFSETVTIVEDTRPKLVFHFDNNEPKVEENREKPTKNITPILPATGDIENVLAFLGILILSVLSIFSLLKNKQNNKV

SEQ ID NO: 392 - protein, 10 aa, S. pyogenes
PKEKPIIYFK

SEQ ID NO: 393 - protein, 12 aa, S. pyogenes
YTFVETAAPDGY

SEQ ID NO: 394 - protein, 10 aa, S. pyogenes
PKEKPIIYFK

SEQ ID NO: 395 - protein, 12 aa, S. pyogenes
YTFVETAAPDGY

SEQ ID NO: 396 - protein, 10 aa, S. pyogenes
PKEKPIIYFK

SEQ ID NO: 397 - protein, 12 aa, S. pyogenes
YTFVETAAPDGY

SEQ ID NO: 398 - protein, 10 aa, S. pyogenes
PKEKPIIYFK

SEQ ID NO: 399 - protein, 12 aa, S. pyogenes
YTFVETAAPDGY

SEQ ID NO: 400 - protein, 10 aa, S. pyogenes
PKGISQDIPK

SEQ ID NO: 401 - protein, 10 aa, S. pyogenes
PKGYQQVTEK

SEQ ID NO: 402 - protein, 11 aa, S. pyogenes
PKMSVVSKYGK

SEQ ID NO: 403 - protein, 11 aa, S. pyogenes
PKYDAKNQEYK

SEQ ID NO: 404 - protein, 12 aa, S. pyogenes
YDLYETKAPKGY

SEQ ID NO: 405 - protein, 12 aa, S. pyogenes
YTFVETAAPDGY

SEQ ID NO: 406 - DNA, 17172 bp, S. pneumoniae
gacaagcttccttatacgaccgctttctatatcggactcttccaagttcttgctcttttaccagggactagccgttcaggtgcaacgattgtcggtggtttgttaaatggaaccagtcgttcagttgtgacagaatttaccttctatcttgggattcccgttatgtttggagctagtgccttaaagattttcaaatttgtgaaagccggagaactcttgagctttgggcaattgtttttgctcttggtcgcgatgggagtagcttttgcggtcagcatggtggctattcgcttcttgaccagctatgtgaaaaaacacgacttcaccctttttggtaaataccgtatcgtgcttggtagtgttttgctactttacagttttgtccgtttatttgtataagaaaaaccttgaaggggtaactcttcaaggttttatactcttagaaaatctcttcaaaccgcgtcagctttatctgcaacctcaaaacagtgttttgagcagcctgcggctagcttcctagtttgctctttgattttcattgagctttaaaatccagtcagggtaatccccaataggcggacacctctttctttctcgcttaattcttcatagagttgcagggctatttggcttatctgactagcatcttgtgttttttggcaagactttttcgtttggtaagagttgaaaagtcctcgtagcggattttcaaaatgacaatttttccagctttttcttgttgatgtagattgagagcgactttttctgatagaagagtcagctcttttttgatatcttcctcggcacggagaatcttcccgtaggttttctccttgccgattgatttacggatgcgattggatttgactggagagttgtgaatgccacgagcctttcgatacagatcatagcctagtctaccaaaacggtctattagggttacctcaggaacttcaagtaaatcagcaccagtaaaaacgcccatttgatgaagacgttctactgtcttttttcctactccatgaaatttggaaatatccatttgtttgagaaaatcctcagcctgttcaggtagaatcactgtcaaaccatgtggtttttgataatcactcgccattttagctaagaatttgttgtaagaaacgcctgcggaagcagttagatggagttctttccagatatctttttgaatgaggcgagcaattttgaccgctgacttgataccgagtttattttctgtcacatccaaataggcttcgtcaatgctcatgggttcaatcaaatctgtatagcgcttaaaaatagctcgaatccggagtcccacagacttgtatttctcataattccctgagataaagacagcctggggacaacgttcataagcttccttggaactcatggcagaatggacaccaaaagctcttgcctcataactacaggtagaaacgactccccgtccacctgtttgccgagggtcgcttccaataatgacaggttttcctctgagtttaggattatccctgatttccactgcagcaaaaaaggcatccatgtcaatatggatgatttttcttgacaaatcatttaacaaaggaaaaatcaacatgcctagcacctttttatactcttcgaaaatctcttcaaaccacgtcagcttccatctgcaacctcaaaacagtattttgagctgacttcgtcagttctatttacaacctcaaagcagtgctttgagcagcctgcggctagtttcctagtttgcttttcgatttccattgagtgtaactgcttattttcttttattatacccttttttctgaaaaaaagaaaaaaggactttatttttttcaaaaatataatacagtttgaaataaaatatagactgttttagaaaagaaagtgtaaaaataggaatttttcacttgttgaaatcggttactttatggtatacttgtctcatgaatgtaacagatgactgttactagaaaaaagaggacattaatatggttgttaagacagttgttgaagcacaagatatttttgacaaagcttgggaaggcttcaaaggcgtagattggaaagaaaaagcaagtgtatcacgctttgtacaagctaactacacaccttatgatggagacgaaagcttccttgcaggaccaacagagcgttcacttcacatcaagaaaattgtagaagaaactaaagcacactacgaagaaactcgtttcccaatggacactcgtccaacatctatcgctgatatccctgctggatttatcgacaaagaaaatgaagttatctttggtatccaaaatgatgaactcttcaaattgaacttcatgccaaaaggtggtatccgtatggctgaaactactttaaaagaaaatggatacgaaccagacccagctgttcacgaaatcttcactaaatatgtaacaacagttaacgacggtattttccgtgcctacacttcaaatattcgtcgcgctcgtcatgcacacactgtaactggtcttccagatgcatactcacgcggacgtatcatcggtgtttacgcacgtcttgctctttacggtgcagactacttgatgcaagaaaaagtaaacgactggaatgcaatcaaagaaatcgatgaagaaacaatccgtcttcgtgaagaagtaaaccttcaataccaagcattgcaacaagttgttcgcctgggtgacctttacggggttgatgttcgcaaaccagcgatgaacgtgaaagaagcaatccaatgggttaacattgctttcatggctgtctgccgtgtgattaacggtgctgctacatctctaggtcgtgtaccaatcgtattggacatctttgcagaacgtgaccttgctcgtggtacatttactgaatcagaaatccaagaattcgttgatgatttcgttatgaaacttcgtacagttaaatttgctcgtaccaaagcttatgaccaattgtactcaggtgacccaacctttatcacaacttctatggctggtatgggtaacgacggtcgtcaccgtgttactaagatggactaccgtttcttgaacactcttgacaacatcggtaactcaccagaaccaaacttgacagttctttggactgacaaattgccatacaacttccgtcgctactgtatgcacatgagccacaaacactcttctatccaatacgaaggtgtaacaacaatggctaaagacggatatggtgaaatgagctgtatctcatgctgtgtgtctccacttgatccagaaaatgaagaacaacgccacaacatccagtacttcggtgctcgtgtaaacgttcttaaagcccttcttactggtttgaatggtggttacgacgatgttcacaaagactacaaagtatttgatatcgaaccaatccgtgacgaagttcttgaatttgaatcagttaaagcgaactttgaaaaatctcttgactggttgactgacacttacgtagatgccttgaacatcatccactacatgactgataggtacaactacgaagctgttcaaatggccttcttgccaactaaacaacgtgccaacatgggattcggtatctgtggatttgctaacactgttgatacattgtcagctatcaaatacgctacagttaaaccaatccgtgacgaagatggctacatctacgattacgaaacaatcggtgactacccacgctggggtgaagatgacccacgttcaaacgaattggcagaatggttgatcgaagcttacacaactcgtctacgtagccacaaactatacaaagacgcagaagctacagtatcacttttgacaatcacatctaacgttgcttactctaaacaaactggtaactcaccagttcacaaaggtgtatacctcaacgaagatggttctgtgaacttgtctaaacttgaattcttctcaccaggtgctaacccatctaacaaagctagacacttgaacagatttgaacttaagaagagtggtccacgattgggtagattgtttcgataaggtggttggttgcaaaacttgaactcactttctagccttgactttagttatgcagctgacggtatctcattgactacacaagtatcacctcgcgctcttggtaagactcgtgatgaacaagttgataacttggtaacaatccttgatggttacttcgaaaacggtggacaacacgttaacttgaacgttatggacttgaacgatgtttacgaaaaaatcatgtcaggcgaagacgttatcgtacgtatctctggatactgtgtaaacactaaatacctcactccagaacaaaaaactgaattgacacaacgtgtcttccacgaagttctttcaatggatgacgccttggatgcattgagctaatcaagttcttgaataataaaaagggctctttgtcaactgtagtgggttgaagaaaagctaagctcgagaaaggacaaattttgtcctttcttttttgatgttcagagcgatgaaaatccgttttttgaagttttcaaagttccgaaaaccaaaggcattgcgcttgatgtctttgatgagtttgttagtggcctcaagtttagcgttagaataaggcaattcaatggcgttagtgatgtagtttttatagcaaataaatgtgctcaaagtggttttaaaggtgcggttgagatgaggtaacgtgtcttgaattaagccccaaaactggtcagtattcttctcttgtagatgaaataggagtagttgatacaggtcatagtaatctttaagttcaggtactagagtaaagattttcttcagacactccctaggagttaaggtctctctgaaagttctagcatagaaaggcttaagagagagtttccgactatcttttaggataaatttccagtaatatttaagagctctgtattccagagatttatcatcaaattgcttcatgatgttgattctagtctgattaagagccctgctcatgtgttggacaatgtggaaacgatcgagaacaattttagcattgggaaataatttcttaatgagagggatataacttccagacatatcaacagtgacgactttaactttttttctagcttctttcgagtacttgaagaaatgatttcggatggttgtttgacgtctgttatcaagaatggtcatgattttcttagtgttgaaatcctgagcaatgaaagccaatttccccttctggtaggagaattcatcccaggagaggatttcaggcaaagtggtgtaatcctcttggaaatgaaattgcttgagcttacgatagacggtagaggtagaggtagagatggctaatttagaagcgatatgtgtaagagcctctctgttgagtaggagttgggcaattttctgtctcaccatttccgagatttggcaatttttctgaacgagagttgtttcagctacagtgactttccgacaggacttgcattgaaatcgtctctttttcaaatgaatgaggctagggaaaccaccaatctcgataaaagggattttagaaggcttttggaagtcgtatttgatttgttttcctttacagtgtttacatttaggtgggtgataatcaagtgtagcgaagacttcgatatgggtatcgtgctgaatggctttatttaaggtgatgtttttgtcttttattccgatgagtaatgtggtatgattgatgtgttccataagatactttctaatgagttgtttaggcgcttttcattataagtcttatgggacttttttgatactcaaaaagccctataatctccacagtgggatttacccactacagaaattatagagccagaaaaaacacttttgttcactagcagaaactagagagcagaagtgtttttctgttcagatttacccaaaactgggaaatatggggataagaatagagatggcttaggaagcccctttttgtgtgtagacagtacgatgaacttataacaaatagtgagcctttttagcaatcattgcgacccgtttgtcaaaagcctcttttcggatatctacaattgtctgatagatgagacgctgttggctaacatgcaaatctaaggcaatcgtcaaaaagtgatgtttccctttgggatactgctttttaacgtaaggcaggtattctttcgttgtaataataatcaatggctctgtcaaatgctcctctgaaggaggaggactaattagaatattgtatcctgtaacagaggcaactttgtcagtaaaattccgtaaaataatggactttattaagtttacatctgcttgattatttaaaatgataaaaatcgggatagcaggtagtgaggaaaagatggtttctgtcaagtagagtgagaaaaggtacagccgatgctggtcgataactccttcaatcttctgctcagtcatccactcttgaacaattgctttcgaaatatgatacagtggcttgtcgctttcaatcccataatgttcgtaataattataatagggaactagattttgtaaaccaaacaaaaacgttcttgttaagaaagtcagtgctgttaaaaaagaaagagaattcgaaatgtcatttcctaagatattcttgaacttggatagtagatgctttcctcttgtatgctgaagaatcagttgaatagtatgagtctttttttcttgattccatttgtccttggaaaacgaagaattagcagaacaataaaccaaaaagatataatccagttcttcctgagtaaaagtcatgttggcatgtggctctaagtaagtttggcaatgttccatcaaaatcggatacataaagaggttttttaatttttcaaactctttggactcagggaactcaagtggaaattcccgacgtttccaagtgagtgccactagtatgctaaaatgaacatactcgtcaggtgtgatttctaacagttcatgactgagttgagaattagactgcacaatcatatgtgtgacccaatccatacttccatcattcaaatcataaatctcaataccaaaatgaaactggaggagtgcaattaaaaaacgaatgcgatattcaggaccaactacttgatttttcacaaggtccaaacctactgaacgtagtaacaagccacacttttgtcgtacgcggtagcctgttgcgatggaaatatactctttttgtgtaaattcgttaaagctttgattaccttgtagtagaaagaagcggagtatttttaaaatagttgattggttataaagctgatggaagtaataattcgtttgatgagaatggtgttcgattaattgaacttgttgcgtatctaaattaaatgtcaactcttcctcgaatgtttcttgtaattcctgcaaaatgcttaggagacttttagattgtaatgaagttaaagtagacagttcatctagttcaatagaccgaatatccaataatatatttaaaatggtaattttatctgtaattcttttttcaatgtatttgtttagcatagttaccgaatcttagttgcatatagataattttaattattataatacaaaagaaactaattgtcttgtcaaaaaggttgtggaatttccgactttattgataaaacagcatgtaataaaaggcattttaaagatagtaatgagtattggtggagttttatggcttattttttttattagaccgtaaaatttctatcattactcataaccacctcaaaataccgaataaaaaaaataatctaaatatttttttatcaaatattgtcgttctataaaaaaatatgtgataaaaatatctattgtgatggaagttgttttaatttatactaggatagttaatagtaatactatactatactatattgtatacaagtgtgtcattgccaggttgagaagatagctataacgcacttttatacgcttttgctacgtttgttagtgaacggattaactcagtgagataaattttatcagaacataagtaatccgtttcttcgtgtatacagattgaaagtacctatgaatcatagaaggattaacttgttctatgaataatgcttaacagggagacacacatgaaaaaagtaagaaagatatttcagaaggcagttgcaggactgtgctgtatatctcagttgacagctttttcttcgatagttgctttagcagaaacgcctgaaaccagtccagcgataggaaaagtagtgattaaggagacaggcgaaggaggagcgcttctaggagatgccgtctttgagttgaaaaacaatacggatggcacaactgtttcgcaaaggacagaggcgcaaacaggagaagcgatattttcaaacataaaacctgggacatacaccttgacagaagcccaacctccagttggttataaaccctctactaaacaatggactgttgaagttgagaagaatggtcggacgactgtccaaggtgaacaggtagaaaatcgagaagaggctctatctgaccagtatccacaaacagggacttatccagatgttcaaacaccttatcagattattaaggtagatggttcggaaaaaaacggacagcacaaggcgttgaatccgaatccatatgaacgtgtgattccagaaggtacactttcaaagagaatttatcaagtgaataatttggatgataaccaatatggaatcgagttgacggttagtggtaaaacgacggttgaaacgaaagaagcctctactccgctagatgttgttattctattagataactccaatagtatgagtaatattcgacataatcatgcccatcgagcggaaaaagcgggagaagcgacacgagcccttgtagataagattacctccaatccagataatcgagtagcacttgtgacttatggctcaactatctttgacggttcagaagctactgtggaaaaaggggtagcagatgcgaacggaaaaatattgaatgactcagctttatggacgttcgatcgtacgacgtttacagctaaaacttataattatagctttttaaatctcacatcagatcctactgatattcaaactattaaggataggattccatcagatgcagaggaattgaacaaagacaaattgatgtatcaattcggcgcgacttttacccagaaggctttgatgaccgctgatgatatcttgacaaagcaggcaagaccaaacagtaaaaaggttattttccacattacagatggtgttccgactatgtcatatccaattaattttaaatatacaggaacgacgcaatcgtacagaactcagctgaataattttaaagcaaaaactccaaatagtagcgggatattactggaggactttgttacatggtcagcagatggtgaacataagattgttcgtggagatggtgaaagttatcagatgtttacgaagaaacctgtaacagaccaatacggagttcatcaaatactttcaatcacctccatggagcagagagctaaattagtttcagcgggatataggttctatggaactgacttgtatttatattggcgtgatagtattctagcctatccatttaactctagtaccgattggattaccaaccatggtgaccctacgacttggtattataacggaaatatggctcaggatggctatgatgtcttcactgttggggttggtgtaaacggggatcctggtacggatgaagcaacggctactagatttatgcagagcatctctagttctcctgacaactacactaacgtagcagatccatctcagattttacaagaattgaatcgctacttctatactatcgtcaatgagaagaaatctatcgaaaatggtacgattacagacccgatgggtgaactaattgatttccaattgggagcagatggaaggtttgatccagcggattacactttaactgcaaacgatggtagttcgttggtgaataatgtccctactgggggaccacaaaatgatggtggcttgctaaaaaatgcaaaagtgttctatgatacgactgagaaaaggattcgtgtaacaggtttgtaccttggaacgggtgaaaaagttacattgacttataatgttcgcttgaatgaccaatttgtaagcaataaattctatgacacgaatggtcgaacaaccctacaccctaaggaagtagaaaagaacacagtgcgcgacttcccgattcctaagattcgtgatgtacgaaagtatccagaaatcacaattccaaaagagaaaaaacttggtgaaattgagtttattaagatcaataagaatgataaaaaaccactgagagatgcggtctttagtcttcaaaaacaacatccggattatccagatatttatggagctattgatcaaaatggcacttatcaaaatgtgagaacaggtgaagatggtaagttgacctttaaaaatctgtcagatgggaaatatcgattatttgaaaattctgaaccagctggttataaacccgttcaaaataagcctatcgttgccttccaaatagtaaatggagaagtcagagatgtgacttcaatcgttccacaagatataccagcgggttacgagtttacgaatgataagcactatatcacaaatgagccaattcctccaaaaagagaatatcctcgaactggtggtatcggaatgttgccattctatctgataggttgcatgatgatgggaggagttctattatacacacggaaacatccgtaaagtgtagcaatgagaaatgataatatcgatactctgagcgatacttttaagaagtagcactcaagaagagatttaagtttacttggtgaaaacagttttcttcgccaagtaaaccaccattgaaaggggagatgttttcgaaaacttgcacagaaaaaaggattattattgtcatgtgtaattcattacattgctcacagttgattttaagagatatgaataaggagaaatcatgaaatcaatcaacaaatttttaacaatgcttgctgccttattactgacagcgagtagcctgttttcagctgcaacagtttttgcggcggacaatgttagtacagcaccagatgctgttactaaaactttaacaatccataagttactgctctcagaagatgatttaaagacttgggatacaaacggtcctaaaggatatgatggaactcaatctagtttaaaagatttaactggagttgtagctgaggaaattccaaatgtatactttgaattacaaaagtataatttgactgatggtaaggaaaaagaaaatcttaaagatgatagtaaatggacaacagttcatggtggtttgacaactaaagatggacttaaaattgaaaccagtactcttaaaggtgtgtatcgtattcgtgaggatagaacaaagactacctatgttggtcctaatgggcaagtattaacaggttcaaaagccgtacctgctcttgtaactcttccacttgttaacaataatggtacagtaattgatgcacatgttttccctaaaaattcatataataaaccagttgtagataaaagaattgctgatactttgaattataacgatcaaaatggtctgtctatcggtactaaaatcccatatgttgttaatacaacaattccaagtaatgcaacatttgcaacttcattttggtcagatgaaatgacagaaggtctaacttataatgaagatgtaacaattactttgaataatgtagctatggatcaagctgattatgaagtcactaaaggaaataatggctttaacttaaaattaacagaagcaggtttagctaaaattaatggtaaggatgcagaccaaaaaatccaaattacttactcagctactttgaactcacttgctgttgcagacattcctgaaagtaacgatattacatatcattacggaaatcatcaagatcatgggaatactccaaaaccaactaaacctaataatggtcaaattacagtaactaagacatgggacagtcaacctgctcctgagggggtgaaagcgactgttcaacttgtaaatgccaagactggtgagaaagtcggtgctcctgtagaactttcagaaaataattggacatatacttggagtggtctagataattctattgaatacaaagttgaagaagaatataatggatactcagctgaatacacagtagagagcaaagggaagttgggggtaaaaaactggaaagataataacccagctccaatcaatcctgaagaaccacgtgtaaaaacatacggtaaaaagtttgtcaaagtagaccaaaaagatactcgtctagaaaatgcgcagttcgttgttaaaaaagcagatagcaataaatatattgcctttaagtcaactgcacaacaagctgcagatgaaaaagcagcagcaactgcaaaacaaaaattggatgcagcggtagcagcttacacaaatgctgcagataagcaagccgctcaagctctagtagatcaagcacagcaagaatacaatgtagcttacaaagaagccaaatttggttatgttgaagtagctggaaaagatgaagcaatggttcttacttctaatacggatggtcaattccaaatttcaggtcttgctgctggtacttataaattagaagaaattaaagctccagaaggttttgcgaaaattgatgatgtagaatttgttgttggagcaggttcttggaatcaaggtgagtttaattacttaaaagatgttcaaaagaatgacgctacaaaagtagtcaacaaaaaaatcactatcccacaaacgggtggtattggtacaattatctttgctgtagcgggggctgcgattatgggtattgcagtgtacgcatatgttaaaaacaacaaagatgaggatcaacttgcttaagtaagagagaaaggagccattgatgacaatgcagaaaatgcagaaaatgattagtcgtatcttctttgttatggctctgtgtttttctcttgtatggggtgcacatgcagtccaagcgcaagaagatcacacgttggtcttgcaattggagaactatcaggaggtggttagtcaattgccatctcgtgatggtcatcggttgcaagtatggaagttggatgattcgtattcctatgatgatcgggtgcaaattgtaagagacttgcattcgtgggatgagaataaactttcttctttcaaaaagacttcgtttgagatgaccttccttgagaatcagattgaagtatctcatattccaaatggtctttactatgttcgctctattatccagacggatgcggtttcttatccagctgaatttctttttgaaatgacagatcaaacggtagagcctttggtcattgtagcgaaaaaaacagatacaatgacaacaaaggtgaagctgataaaggtggatcaagaccacaatcgcttggagggtgtcggctttaaattggtatcagtagcaagagatggttctgaaaaagaggttcccttgattggagaataccgttacagttcttctggtcaagtagggagaactctctatactgataaaaatggagagatttttgtgacaaatcttcctcttgggaactatcgtttcaaggaggtggagccactggcaggctatgctgttacgacgctggatacggatgtccagctggtagatcatcagctggtgacgattacggttgtcaatcagaaattaccacgtggcaatgttgactttatgaaggtggatggtcggaccaatacctctcttcaaggggcaatgttcaaagtcatgaaagaagaaagcggacactatactcctgttcttcaaaatggtaaggaagtagttgtaacatcagggaaagatggtcgtttccgagtggaaggtctagagtatgggacatactatttatgggagctccaagctccaactggttatgttcaattaacatcgcctgtttcctttacaatcgggaaagatactcgtaaggaactggtaacagtggttaaaaataacaagcgaccacggattgatgtgccagatacaggggaagaaaccttgtatatcttgatgcttgttgccattttgttgtttggtagtggttattatcttacgaaaaaaccaaataactgatattcaatgtacatcattatgaaaaagatagcaggctgaagggaagaccagagtactctgaggtgatgttaatcaggaatcatggtgatgtggcatgaatcacaataacggatatgaggctgggcagattgtgccagcctcattgtgggttattgtttgtaaaacgataggactggtctggtaatcattttaggaatggacaggactgggattctgatttaaaatggatggtgaatcagaaagaaatgagattttctcgtttctcttagcagataggattgtctgttaggaaaagcgataaaatgatgagtttgaagataaagggatgctgataaaaatggtaaaaacaaaaaagcaaaaacgaaataatctcctattaggagtggtatttttcattggaatggcggtaatggcgtatccgctggtgtctcgcttgtattatcgagtggaatcaaatcaacaaattgctgactttgataaggaaaaagcaacgttggatgaggctgacattgatgaacgaatgaaattggcacaagccttcaatgactctttgaataatgtagtgagtggcgatccttggtcggaagaaatgaagaaaaaagggcgagcagagtatgcacgtatgttagaaatccatgagcggatggggcatgtggaaatccccgttattgacgtggatttgccggtttatgctggtactgctgaagaggtattgcagcaaggggctgggcatctagagggaacttctctgccgatcggaggcaattcgacccatgcggtgattacggcacatacaggtttgccaacagctaagatgtttacggatttgaccaaacttaaagttggggataagttttatgtgcacaatatcaaggaagtgatggcctatcaagtggatcaagtaaaggtgattgagccgacgaactttgatgatttattgattgtaccaggtcatgattatgtgaccttgctgacttgtacgccatacatgatcaatacccatcgtctattggttcgggggcatcggataccgtacgtagcagaggttgaggaagaatttattgcagcaaacaaactcagtcatctctatcgctacctgttttatgtggcagttggtttgattgtgattcttttatggattattcgacgcttgcgcaagaagaaaaaacaaccggaaaaggctttgaaggcgctgaaagcagcaaggaaggaagtgaaggtggaggatggacaacagtagacgttcacgaaaaaaaggcacaaaaaagaagaaacatccgctgatccttcttctgattttcttagtaggattcgccgttgcgatatatccattggtgtctcgttattattatcgtattgagtcaaacgaggttattaaagagtttgatgagacggtttcccagatggataaggcagaacttgaggagcgttggcgcttggctcaagccttcaatgcgaccttgaaaccatctgaaattcttgatccttttacagagcaagagaaaaagaaaggcgtctcagaatatgccaatatgctaaaggtccatgagcggattggctatgtggaaattcctgcgattgatcaggaaattccgatgtatgtcggaacgagtgaggaaattcttcagaagggcgcaggattgctagagggagcttcgttaccggttggtggtgaaaatacccacacagttgtcactgctcatagaggattaccgacggcagaactgtttagtcaattggataagatgaaaaaaggggatgtcttttatcttcacgttttagaccaggtgttggcctaccaagtggatcagattttgacggttgagccaaatgactttgagcctgtcttgattcaacatggggaagattatgcgaccttgttgacctgtacaccgtatatgattaacagtcatcgtctgttggtacgtgggaagcggattccgtatacggcaccaattgcagagcgaaatcgagcggtgagagagcgtgggcaattctggttgtggttattgctagcggcgttggttatgattctggtattgagttacggggtgtatcgtcatcgtcgcattgtcaaagggctagaaaaacaattggaggagcatcatgtcaaaggctaagctacagaaattactagggcagtctttaggacaagtaaaaggtcatgagatattttcagaatctgtgacggccgacagttaccaagagcaattgcaacggtcgcttgattacaatcaacgcttggattcgcaaaatcgtattgtagatccttttttggcggaagggtatgaggtaaattaccaagtgtctgacgatcctgatgcagtctacggctatttgtcgattccgagtttggaaatcatggagccagtttatctaggagcggattaccatcatttagcaatggggttggcccatgtggatgggacgcctcttcctgttgagggaaaagggattcgttcagtgattgctgggcaccgtgcagaaccaagccatgtctttttccgccatttggatcagctaaaagttggagatgctctttattatgataatggccaggaaattgtagaatatcagatgatggacacagagattattttaccgtcggaatgggaaaaattagaatcggttagctctaaaaatatcatgaccttgataacctgcgatccgattcctacctttaataaacgcttattagtgaattttgaacgagtcgctgtttatcaaaaatcagatccacaaacagctgcagttgcgagggttgcttttacgaaagaaggacaatctgtatcgcgtgttgcaacctctcaatggttgtaccgtgggctagtggtactggcatttctgggaatcctgtttgttttgtggaagctagcacgtttactacgagggaaataaaaagaaatgaaaggaaagctaaggctgttcctttttccggctctttgtcaactgtagtgggttgaaaaaaagctaagctcgagaaaggacaaattttgtcctttcttttttgatattcagagcgataaaaatccgttttttgaagttttcaaa

SEQ ID NO: 407 - protein, 774 aa, S. pneumoniae
MVVKTVVEAQDIFDKAWEGFKGVDWKEKASVSRFVQANYTPYDGDESFLAGPTERSLHIKKIVEETKAHYEETRFPMDTRPTSIADIPAGFIDKENEVIFGIQNDELFKLNFMPKGGIRMAETTLKENGYEPDPAVHEIFTKYVTTVNDGIFRAYTSNIRRARHAHTVTGLPDAYSRGRIIGVYARLALYGADYLMQEKVNDWNAIKEIDEETIRLREEVNLQYQALQQVVRLGDLYGVDVRKPAMNVKEAIQWVNIAFMAVCRVINGAATSLGRVPIVLDIFAERDLARGTFTESEIQEFVDDFVMKLRTVKFARTKAYDQLYSGDPTFITTSMAGMGNDGRHRVTKMDYRFLNTLDNIGNSPEPNLTVLWTDKLPYNFRRYCMHMSHKHSSIQYEGVTTMAKDGYGEMSCISCCVSPLDPENEEQRHNIQYFGARVNVLKALLTGLNGGYDDVHKDYKVFDIEPIRDEVLEFESVKANFEKSLDWLTDTYVDALNIIHYMTDRYNYEAVQMAFLPTKQRANMGFGICGFANTVDTLSAIKYATVKPIRDEDGYIYDYETIGDYPRWGEDDPRSNELAEWLIEAYTTRLRSHKLYKDAEATVSLLTITSNVAYSKQTGNSPVHKGVYLNEDGSVNLSKLEFFSPGANPSNKAKGGWLQNLNSLSSLDFSYAADGISLTTQVSPRALGKTRDEQVDNLVTILDGYFENGGQHVNLNVMDLNDVYEKIMSGEDVIVRISGYCVNTKYLTPEQKTELTQRVFHEVLSMDDALDALS

SEQ ID NO: 408 - protein, 420 aa, S. pneumoniae
ARSLVFKTREKKINLAIFIRKKFNEFNRFGFANRKIDKILKNTAELKANSYPLEIANTIYNKYCIFTSLTTKFTRNLHPLTDQILGWFQDTNKEQLHFLLLQYLDYYDKLEPVLTFIKKLCERPTLTERFTRAYFPKLSLKRSDKLIFKWYYKLARYELSKDDFQKMINIRTQNLARSMHQVIHFRDLVIKANPFLKKILPIYSGSMDVTVVKVKKRAEKSYKFFHNRITTQRRNDLITMIKKTNFDQAIFALKGKQYSFEDWSLIEPLTTYDEQFHFQKLKRYVTSTSTSIALKSAIHTLAERNLLLQAIKQRVMESIQCNKQVLTTEAVTVKRCSKCQFRRKKLHILSPFGGIEIFPIKSPKQFDYKIQKGKCHKCKPPHYDLTAFVEIHTDHQIAKNLTINKDKIGILLTTHNIHEM

SEQ ID NO: 409 - protein, 509 aa, S. pneumoniae
LLYHAKKAIMAVRKDFAEKRIDVITQYILRQQSVHLDLAITLFHHKGKPYQKKVYPLYEKTTIIILPETLHEESPPPSILINYGTVSAVKDTFNRLIISKILNVDAQNNLIIFIPIAPLSSFITETLYLSFLYLRHQDIVGEIKQETMWEQVIAKSIHYLPKDSEIGYHEYYNYYPVLNQLGFLFTRTLFTLATLFSLSNSIDNGLINKFKSLLHKGRTHQLILQITHTKKEQNWKDKSFSSNASCYVLFIYDLEEQTFTMNAHPELYTQCHEMLIPYMFLNKLKEFEKSEPFELPFERRKWTLAVLISFHVYEDPTIELLEHSLQSNSQVIMHTVWDMSGDNLDYIEIGFHFQLLAILFRIRYEPGVVQNKVLDLGVSRLLLGCKQRVRYGTAISIYEKQTFENFSQNGQLLFFRLIKLITSQNYLQHFYYNTQHSHHEILQVQQTDLNFTLEEEFTEQLEQLISLLSKSQLSTLTSLEDLEISRIDLLINLITIKDTIRKEIYKNLM

SEQ ID NO: 410 - protein, 891 aa, S. pneumoniae
MLNRETHMKKVRKIFQKAVAGLCCISQLTAFSSIVALAETPETSPAIGKVVIKETGEGGALLGDAVFELKNNTDGTTVSQRTEAQTGEAIFSNIKPGTYTLTEAQPPVGYKPSTKQWTVEVEKNGRTTVQGEQVENREEALSDQYPQTGTYPDVQTPYQIIKVDGSEKNGQHKALNPNPYERVIPEGTLSKRIYQVNNLDDNQYGIELTVSGKTTVETKEASTPLDVVILLDNSNSMSNIRHNHAHRAEKAGEATRALVDKITSNPDNRVALVTYGSTIFDGSEATVEKGVADANGKILNDSALWTFDRTTFTAKTYNYSFLNLTSDPTDIQTIKDRIPSDAEELNKDKLMYQFGATFTQKALMTADDILTKQARPNSKKVIFHITDGVPTMSYPINFKYTGTTQSYRTQLNNFKAKTPNSSGILLEDFVTWSADGEHKIVRGDGESYQMFTKKPVTDQYGVHQILSITSMEQRAKLVSAGYRFYGTDLYLYWRDSILAYPFNSSTDWITNHGDPTTWYYNGNMAQDGYDVFTVGVGVNGDPGTDEATATRFMQSIWSSSPDNYTNVADPSQILQELNRYFYTIVNEKKSIENGTITDPMGELIDFQLGADGRFDPADYTLTANDGSSLVNNVPTGGPQNDGGLLKNAKVFYDTTEKRIRVTGLYLGTGEKVTLTYNVRLNDQFVSNKFYDTNGRTTLHPKEVEKNTVRDFPIPKIRDVRKYPEITIPKEKKLGEIEFIKINKNDKKPLRDAVFSLQKQHPDYPDIYGAIDQNGTYQNVRTGEDGKLTFKNLSDGKYRLFENSEPAGYKPVQNKPIVAFQIVNGEVRDVTSIVPQDIPAGYEFTNDKHYITNEPIPPKREYPRTGGIGMLPFYLIGCMMMGGVLLYTRKHP

SEQ ID NO: 411 - protein, 644 aa, S. pneumoniae; identical to SEQ ID NO: 174

SEQ ID NO: 412 - protein, 401 aa, S. pneumoniae; identical to SEQ ID NO: 175

SEQ ID NO: 413 - protein, 304 aa, S. pneumoniae; identical to SEQ ID NO: 176

SEQ ID NO: 414 - protein, 249 aa, S. pneumoniae
VSRYYYRIESNEVIKEFDETVSQMDKAELEERWRLAQAFNATLKPSEILDPFTEQEKKKGVSEYANMLKVHERIGYVEIPAIDQEIPMYVGTSEEILQKGAGLLEGASLPVGGENTHTVVTAHRGLPTAELFSQLDKMKKGDVFYLHVLDQVLAYQVDQILTVEPNDFEPVLIQHGEDYATLLTCTPYMINSHRLLVRGKRIPYTAPIAERNRAVRERGQFWLWLLLAALVMILVLSYGVYRHRRIVKG

SEQ ID NO: 415 - protein, 295 aa, S. pneumoniae
MSKAKLQKLLGLEKQLEEHHVKGYLLMLVALVIPVYCFGQMVLQSLGQVKGHEIFSESVTADSYQEQLQRSLDYNQRLDSQNRIVDPFLAEGYEVNYQVSDDPDAVYGYLSIPSLEIMEPVYLGADYHHLAMGLAHVDGTPLPVEGKGIRSVIAGHRAEPSHVFFRHLDQLKVGDALYYDNGQEIVEYQMMDTEIILPSEWEKLESVSSKNIMTLITCDPIPTFNKRLLVNFERVAVYQKSDPQTAAVARVAFTKEGQSVSRVATSQWLYRGLVVLAFLGILFVLWKLARLLRGK

SEQ ID NO: 416 - protein, 509 aa, S. pneumoniae; identical to SEQ ID NO: 87

SEQ ID NO: 417 - protein, 509 aa, S. pneumoniae; identical to SEQ ID NO: 87

SEQ ID NO: 418 - protein, 509 aa, S. pneumoniae; identical to SEQ ID NO: 87

SEQ ID NO: 419 - protein, 509 aa, S. pneumoniae; identical to SEQ ID NO: 87

SEQ ID NO: 420 - protein, 509 aa, S. pneumoniae; identical to SEQ ID NO: 87

SEQ ID NO: 421 - protein, 509 aa, S. pneumoniae; identical to SEQ ID NO: 87

SEQ ID NO: 422 - protein, 509 aa, S. pneumoniae; identical to SEQ ID NO: 87

SEQ ID NO: 423 - protein, 509 aa, S. pneumoniae; identical to SEQ ID NO: 87

SEQ ID NO: 424 - protein, 509 aa, S. pneumoniae; identical to SEQ ID NO: 87

SEQ ID NO: 425 - protein, 509 aa, S. pneumoniae; identical to SEQ ID NO: 87

SEQ ID NO: 426 - protein, 823 aa, S. pneumoniae
MKKVRKIFQKAVAGLCCISQLTAFSSIVALAETPETSPAIGKVVIKETGEGGALLGDAVFELKNNTDGTTVSQRTEAQTGEAIFSNIKPGTYTLTEAQPPVGYKPSTKQWTVEVEKNGRTTVQGEQVENREEALSDQYPQTGTYPDVQTPYQIIKVDGSEKNGQHKALNPNPYERVIPEGAEKAGEATRALVDKITSNPDNRVALVTYGSTIFDGSEATVEKGVADANGKILNDSALWTFDRTTFTAKTYNYSFLNLTSDPTDIQTIKDRIPSDAEELNKDKLMYQFGATFTQKALMTADDILTKQARPNSKKVIFHITDGVPTMSYPINFKYTGTTQSYRTQLNNFKAKTPNSSGILLEDFVTWSADGEHKIVRGDGESYQMFTKKPVTDQYGVHQILSITSMEQRAKLVSAGYRFYGTDLYLYWRDSILAYPFNSSTDWITNHGDPTTWYYNGNMAQDGYDVFTVGVGVNGDPGTDEATATRFMQSISSSPDNYTNVADPSQILQELNRYFYTIVNEKKSIENGTITDPMGELIDFQLGADGRFDPADYTLTANDGSSLVNNVPTGGPQNDGGLLKNAKVFYDTTEKRIRVTGLYLGTGEKVTLTYNVRLNDQFVSNKFYDTNGRTTLHPKEVEKNTVRDFPIPKIRDVRKYPEITIPKEKKLGEIEFIKINKNDKKPLRDAVFSLQKQHPDYPDIYGAIDQNGTYQNVRTGEDGKLTFKNLSDGKYRLFENSEPAGYKPVQNKPIVAFQIVNGEVRDVTSIVPQDIPAGYEFTNDKHYITNEPIPPKREYPRTGGIGMLPFYLIGCMMMGGVLLYTRKNP

SEQ ID NO: 427 - protein, 883 aa, S. pneumoniae; identical to SEQ ID NO: 188

SEQ ID NO: 428 - protein, 883 aa, S. pneumoniae; identical to SEQ ID NO: 195

SEQ ID NO: 429 - protein, 883 aa, S. pneumoniae; identical to SEQ ID NO: 195

SEQ ID NO: 430 - protein, 883 aa, S. pneumoniae; identical to SEQ ID NO: 195

SEQ ID NO: 431 - protein, 883 aa, S. pneumoniae; identical to SEQ ID NO: 195

SEQ ID NO: 432 - protein, 886 aa, S. pneumoniae; identical to SEQ ID NO: 223

SEQ ID NO: 433 - protein, 886 aa, S. pneumoniae
MKKVRKIFQKAVAGLCCISQLTAFSSIVALAETPETSPAIGKVVIKETGEGGALLGDAVFELKNNTNGTTVSQRTEAQTGEAIFSNIKPGTYTLTEAQPPVGYKPSTKQRTVEVEKNGRTTVQGEQVENREEALSDQYPQTGTYPDVQTPYQIIKVDGSEKNGQHKALNPNPYERVIPEGTLSKRIYQVNNLDDNQYGIELTVSGKTVYERKDKSVPLDVVILLDNSNSMSNIRNKNARRAERAGEATRSLIDKITSDPENRVALVTYASTIFDGTEFTVEKGVADKNGKRLNDSLFWNYDQTSFTTNTKDYSYLKLTNDKNDIVELKNKVPTEAEDHDGNRLMYQFGATFTQKALMKADEILTQQARQNSQKVIFHITDGVPTMSYPINFNHATFAPSYQNQLNVFFSKSPNKDGILLSDFITQATSGEHTIVRGDGQSYQMFTDKTVYEKGAPAAFPVKPEKYSEMKAVGYAVIGDPINGGYIWLNWRESILAYPFNSNTAKITNHGDPTRWYYNGNIAPDGYDVFTVGIGINGDPGTDEATATSFMQSISSKPENYTNVTDTTKILEQLNRYFHTIVTEKKSIENGTITDPMGELIDLQLGTDGRFDPADYTLTANDGSRLENGQAVGGPQNDGGLLKNAKVFYDTTEKRIRVTGLYLGTGEKVTLTYNVRLNDQFVSNKFYDTNGRTTLHPKEVEKNTVRDFPIPKIRDVRKYPAITIAKEKKLGEIEFIKINKNDKKPLRDAVFSLQKQHPDYPDIYGAIDQNGTYQNVRTGEDGKLTFKNLSDGKYRLFENSEPAGYKPVQNKPIVAFQIVNGEVRDVTSIVPQDIPAGYEFTNDKHYITNEPIPPKREYPRTGGIGMLLFYLIGCMMMGGVLLYTRKHP

SEQ ID NO: 434 - protein, 886 aa, S. pneumoniae; identical to SEQ ID NO: 230

SEQ ID NO: 435 - protein, 886 aa, S. pneumoniae
MKKVRKIFQKAVAGLCCISQLTAFSSIVALAETPETSPAIGKVVIKETGEGGALLGDAVFELKNNTDGTTVSQRTEAQTGEAIFSNIKPGTYTLTEAQPPVGYKPSTKQWTVEVEKNGRTTVQGEQVENREEALSDQYPQTGTYPDVQTPYQIIKVDGSEKNGQHKALNPNPYERVIPEGTLSKRIYQVNNLDDNQYGIELTVSGKTVYEQKDKSVPLDVVILLDNSNSMSNIRNKNARRAERAGEATRSLIDKITSDSENRVALVTYASTIFDGTEFTVEKGVADKNGKRLNDSLFWNYDQTSFTTNTKDYSYLKLTNDKNDIVELKNKVPTEAEDHDGNRLMYQFGATFTQKALMKADEILTQQARQNSQKVIFHITDGVPTMSYPINFNHATFAPSYQNQLNAFFSKSPNKDGILLSDFITQATSGEHTIVRGDGQSYQMFTDKTVYEKGAPAAFPVKPEKYSEMKAAGYAVIGDPINGGYIWLNWRESILAYPFNSNTAKITNHGDPTRWYYNGNIAPDGYDVFTVGIGINGDPGTDEATATSFMQSISSKPENYTNVTDTTKILEQLNRYFHTIVTEKKSIENGTITDPMGELIDLQLGTDGRFDPADYTLTANDGSRLENGQAVGGPQNDGGLLKNAKVLYDTTEKRIRVTGLYLGTDEKVTLTYNVRLNDEFVSNKFYDTNGRTTLHPKEVEQNTVRDFPIPKIRDVRKYPEITISKEKKLGDIEFIKVNKNDKKPLRGAVFSLQKQHPDYPDIYGAIDQNGTYQNVRTGEDGKLTFKNLSDGKYRLFENSEPAGYKPVQNKPIVAFQIVNGEVRDVTSIVPQDIPAGYEFTNDKHYITNEPIPPKREYPRTGGIGMLPFYLIGCMMMGGVLLYTRKHP

SEQ ID NO: 436 - protein, 644 aa, S. pneumoniae; identical to SEQ ID NO: 174

SEQ ID NO: 437 - protein, 644 aa, S. pneumoniae; identical to SEQ ID NO: 174

SEQ ID NO: 438 - protein, 644 aa, S. pneumoniae; identical to SEQ ID NO: 174

SEQ ID NO: 439 - protein, 644 aa, S. pneumoniae; identical to SEQ ID NO: 174

SEQ ID NO: 440 - protein, 644 aa, S. pneumoniae; identical to SEQ ID NO: 189
  VARIANT (1)...(644): Xaa = Any Amino Acid

SEQ ID NO: 441 - protein, 644 aa, S. pneumoniae; identical to SEQ ID NO: 238

SEQ ID NO: 442 - protein, 654 aa, S. pneumoniae; identical to SEQ ID NO: 231

SEQ ID NO: 443 - protein, 665 aa, S. pneumoniae; identical to SEQ ID NO: 210

SEQ ID NO: 444 - protein, 612 aa, S. pneumoniae
MKSINKFLTMLAALLLTASSLFSAATVFAAGTTTTSVTVHKLLATDGDMDKIANELETGNYAGNKVGVLPANAKEIAGVMFVWTNTNNEIIDENGQTLGVNIDPQTFKLSGAMPATAMKKLTEAEGAKFNTANLPAAKYKIYEIHSLSTYVGEDGATLTGSKAVPIEIELPLNDVVDAHVYPKNTEAKPKIDKDFKGKANPDTPRVDKDTPVNHQVGDVVEYEIVTKIPALANYATANWSDRMTEGLAFNKGTVKVTVDDVALEAGDYALTEVATGFDLKLTDAGLAKVNDQNAEKTVKITYSATLNDKAIVEVPESNDVTFNYGNNPDHGNTPKPNKPNENGDLTLTKFVERSIKGYSADYQEITTAGEIAVKNWKDENPKPLDPTEPKVVTYGKKFVKVNDKDNRLAGAEFVIANADNAGQYLARKADKVSQEEKQLVVTTKDALDRAVAAYNALTAQQQTQQEKEKVDKAQAAYNAAVIAANNAFEWVADKDNENVVKLVSDAQGRFEITGLLAGTYYLEETKQPAGYALLTSRQKFEVTATSYSATGQGIEYTAGSGKDDATKVVNKKITIPQTGGIGTIIFAVAGAVIMGIAVYAYVKNNKDEDQLA

SEQ ID NO: 445 - protein, 665 aa, S. pneumoniae; identical to SEQ ID NO: 85

SEQ ID NO: 446 - protein, 401 aa, S. pneumoniae; identical to SEQ ID NO: 175

SEQ ID NO: 447 - protein, 401 aa, S. pneumoniae
MTMQKMQKMISRIFFVMALCFSLVWGAHAVQAQEDHTLVLQLENYQEVVSQLPSRDGHRLQVWKLDDSYSYDDRVQIVRDLHSWDENKLSSFKKTSFEMTFLENQIEVSHIPNGLYYVRSIIQTDAVSYPAEFLFEMTDQTVEPLVIVAKKTDTMTTKVKLIKVDQDHNRLEGVGFKLVSVARDVSEKEVPLIGEYRYSSSGQVGRTLYTDKNGEIFVTNLPLGNYRFKEVEPLAGYAVTTLDTDVQLVDHQLVTITVVNQKLPRGNVDFMKVDGRTNTSLQGAMFKVMKEESGHYTPVLQNGKEVVVTSGKDGRFRVEGLEYGTYYLWELQAPTGYVQLTSPVSFTIGKDTRKELVTVVKNNKRPRIDVPDTGEETLYILMLVAILLFGSGYYLTKKPNN

SEQ ID NO: 448 - protein, 401 aa, S. pneumoniae; identical to SEQ ID NO: 175

SEQ ID NO: 449 - protein, 401 aa, S. pneumoniae; identical to SEQ ID NO: 175

SEQ ID NO: 450 - protein, 401 aa, S. pneumoniae; identical to SEQ ID NO: 175

SEQ ID NO: 451 - protein, 401 aa, S. pneumoniae; identical to SEQ ID NO: 175

SEQ ID NO: 452 - protein, 401 aa, S. pneumoniae; identical to SEQ ID NO: 225

SEQ ID NO: 453 - protein, 401 aa, S. pneumoniae; identical to SEQ ID NO: 225

SEQ ID NO: 454 - protein, 413 aa, S. pneumoniae; identical to SEQ ID NO: 211

SEQ ID NO: 455 - protein, 401 aa, S. pneumoniae; identical to SEQ ID NO: 239

SEQ ID NO: 456 - protein, 304 aa, S. pneumoniae; identical to SEQ ID NO: 233

SEQ ID NO: 457 - protein, 304 aa, S. pneumoniae; identical to SEQ ID NO: 176

SEQ ID NO: 458 - protein, 304 aa, S. pneumoniae; identical to SEQ ID NO: 176

SEQ ID NO: 459 - protein, 304 aa, S. pneumoniae; identical to SEQ ID NO: 176

SEQ ID NO: 460 - protein, 304 aa, S. pneumoniae; identical to SEQ ID NO: 176

SEQ ID NO: 461 - protein, 304 aa, S. pneumoniae; identical to SEQ ID NO: 176

SEQ ID NO: 462 - protein, 304 aa, S. pneumoniae; identical to SEQ ID NO: 176

SEQ ID NO: 463 - protein, 302 aa, S. pneumoniae; identical to SEQ ID NO: 212

SEQ ID NO: 464 - protein, 302 aa, S. pneumoniae; identical to SEQ ID NO: 212

SEQ ID NO: 465 - protein, 302 aa, S. pneumoniae; identical to SEQ ID NO: 226

SEQ ID NO: 466 - protein, 297 aa, S. pneumoniae; identical to SEQ ID NO: 192

SEQ ID NO: 467 - protein, 297 aa, S. pneumoniae; identical to SEQ ID NO: 192

SEQ ID NO: 468 - protein, 297 aa, S. pneumoniae; identical to SEQ ID NO: 192

SEQ ID NO: 469 - protein, 297 aa, S. pneumoniae; identical to SEQ ID NO: 192

SEQ ID NO: 470 - protein, 297 aa, S. pneumoniae; identical to SEQ ID NO: 192

SEQ ID NO: 471 - protein, 297 aa, S. pneumoniae; identical to SEQ ID NO: 234

SEQ ID NO: 472 - protein, 297 aa, S. pneumoniae; identical to SEQ ID NO: 213

SEQ ID NO: 473 - protein, 297 aa, S. pneumoniae; identical to SEQ ID NO: 213

SEQ ID NO: 474 - protein, 297 aa, S. pneumoniae; identical to SEQ ID NO: 227

SEQ ID NO: 475 - protein, 297 aa, S. pneumoniae
MDNSRRSRKKGTKKKKHPLILLLIFLVGFAVAIYPLVSRYYYRIESNEVIKEFDETVSQMDKAELEERWRLAQAFNATLKPSEILDPFTEQEKKKGVSEYANMLKVHERIGYVEIPAIDQEIPMYVGTSEDILQKGAGLLEGASLPVGGENTHTVITAHRGLPTAELFSQLDKMKKGDIFYLHVLDQVLAYQVDQIVTVEPNDFEPVLIQHGEDYATLLTCTPYMINSHRLLVRGKRIPYTAPIAERNRAVRERGQFWLWLLLGAMAVILLLLYRVYRNRRIVKGLEKQLEGRHVKD

SEQ ID NO: 476 - protein, 283 aa, S. pneumoniae; identical to SEQ ID NO: 178

SEQ ID NO: 477 - protein, 283 aa, S. pneumoniae; identical to SEQ ID NO: 193

SEQ ID NO: 478 - protein, 283 aa, S. pneumoniae; identical to SEQ ID NO: 178

SEQ ID NO: 479 - protein, 283 aa, S. pneumoniae; identical to SEQ ID NO: 178

SEQ ID NO: 480 - protein, 283 aa, S. pneumoniae; identical to SEQ ID NO: 178

SEQ ID NO: 481 - protein, 283 aa, S. pneumoniae; identical to SEQ ID NO: 178

SEQ ID NO: 482 - protein, 283 aa, S. pneumoniae; identical to SEQ ID NO: 80

SEQ ID NO: 483 - protein, 283 aa, S. pneumoniae; identical to SEQ ID NO: 80

SEQ ID NO: 484 - protein, 283 aa, S. pneumoniae; identical to SEQ ID NO: 80

SEQ ID NO: 485 - protein, 283 aa, S. pneumoniae; identical to SEQ ID NO: 80

SEQ ID NO: 486 - protein, 893 aa, S. pneumoniae; identical to SEQ ID NO: 86

SEQ ID NO: 487 - DNA, 26 bp, S. pneumoniae
cgggatccgaaacgcctgaaaccagt

SEQ ID NO: 488 - DNA, 24 bp, S. pneumoniae
ccgctcgagaataggttcattggt

SEQ ID NO: 489 - protein, 665 aa, S. pneumoniae; identical to SEQ ID NO: 85

SEQ ID NO: 490 - DNA, 23 bp, S. pneumoniae
cgggatccgctgcaacagttttt

SEQ ID NO: 491 - DNA, 27 bp, S. pneumoniae
ccgctcgagagtgatttttttgttgac

SEQ ID NO: 492 - protein, 393 aa, S. pneumoniae; identical to SEQ ID NO: 84

SEQ ID NO: 493 - DNA, 29 bp, S. pneumoniae
cgggatcccatgcagtccaagcgcaagaa

SEQ ID NO: 494 - DNA, 27 bp, S. pneumoniae
ccgctcgagcttgttatttttaaccac

SEQ ID NO: 495 - DNA, 11352 bp, S. pneumoniae
gtttaggcgcttttcattataagtcttatgggacttttttgatactcaaaaagccctataatctccacagtgggatttacccactacagaaattatagagccagaaaaaacacttttgttcactagcagaaactagagagcagaagtgtttttctgttcagatttacccaaaactgggaaatatggggataagaatagagatggcttaggaagcccctttttgtgtgtagacagtacgatgaacttataacaaatagtgagcctttttagcaatcattgcgacccgtttgtcaaaagcctcttttcggatatctacaattgtctgatagatgagacgctgttggctaacatgcaaatctaaggcaatcgtcaaaaagtgatgtttccctttgggatactgctttttaacgtaaggcaggtattctttcgttgtaataataatcaatggctctgtcaaatgctcctctgaaggaggaggactaattagaatattgtatcctgtaacagaggcaactttgtcagtaaaattccgtaaaataatggactttattaagtttacatctgcttgattatttaaaatgataaaaatcgggatagcaggtagtgaggaaaagatggtttctgtcaagtagagtgagaaaaggtacagccgatgctggtcgataactccttcaatcttctgctcagtcatccactcttgaacaattgctttcgaaatatgatacagtggcttgtcgctttcaatcccataatgttcgtaataattataatagggaactagattttgtaaaccaaacaaaaacgttcttgttaagaaagtcagtgctgttaaaaaagaaagagaattcgaaatgtcatttcctaagatattcttgaacttggatagtagatgctttcctcttgtatgctgaagaatcagttgaatagtatgagtctttttttcttgattccatttgtccttggaaaacgaagaattagcagaacaataaaccaaaaagatataatccagttcttcctgagtaaaagtcatgttggcatgtggctctaagtaagtttggcaatgttccatcaaaatcggatacataaagaggttttttaatttttcaaactctttggactcagggaactcaagtggaaattcccgacgtttccaagtgagtgccactagtatgctaaaatgaacatactcgtcaggtgtgatttctaacagttcatgactgagttgagaattagactgcacaatcatatgtgtgacccaatccatacttccatcattcaaatcataaatctcaataccaaaatgaaactggaggagtgcaattaaaaaacgaatgcgatattcaggaccaactacttgatttttcacaaggtccaaacctactgaacgtagtaacaagccacacttttgtcgtacgcggtagcctgttgcgatggaaatatactctttttgtgtaaattcgttaaagctttgattaccttgtagtagaaagaagcggagtatttttaaaatagttgattggttataaagctgatggaagtaataattcgtttgatgagaatggtgttcgattaattgaacttgttgcgtatctaaattaaatgtcaactcttcctcgaatgtttcttgtaattcctgcaaaatgcttaggagacttttagattgtaatgaagttaaagtagacagttcatctagttcaatagaccgaatatccaataatatatttaaaatggtaattttatctgtaattcttttttcaatgtatttgtttagcatagttaccgaatcttagttgcatatagataattttaattattataatacaaaagaaactaattgtcttgtcaaaaaggttgtggaatttccgactttattgataaaacagcatgtaataaaaggcattttaaagatagtaatgagtattggtggagttttatggcttattttttttattagaaaatatttttttatcaaatattgtcgttctataaaaaaatatgtgataaaaatatctattgtgatggaagttgttttaatttatactaggatagttaatagtaatactatactatactatattgtatacaagtgtgtcattgccaggttgagaagatagctataacgcacttttatacgcttttgctacgtttgttagtgaacggattaactcagtgagataaattttatcagaacataagtaatccgtttcttcgtgtatacagattgaaagtacctatgaatcatagaaggattaacttgttctatgaataatgcttaacagggagacacacatgaaaaaagtaagaaagatatttcagaaggcagttgcaggactgtgctgtatatctcagttgacagctttttcttcgatagttgctttagcagaaacgcctgaaaccagtccagcgataggaaaagtagtgattaaggagacaggcgaaggaggagcgcttctaggagatgccgtctttgagttgaaaaacaatacggatggcacaactgtttcgcaaaggacagaggcgcaaacaggagaagcgatattttcaaacataaaacctgggacatacaccttgacagaagcccaacctccagttggttataaaccctctactaaacaatggactgttgaagttgagaagaatggtcggacgactgtccaaggtgaacaggtagaaaatcgagaagaggctctatctgaccagtatccacaaacagggacttatccagatgttcaaacaccttatcagattattaaggtagatggttcggaaaaaaacggacagcacaaggcgttgaatccgaatccatatgaacgtgtgattccagaaggtacactttcaaagagaatttatcaagtgaataatttggatgataaccaatatggaatcgagttgacggttagtggtaaaacgacggttgaaacgaaagaagcctctactccgctagatgttgttattctattagataactccaatagtatgagtaatattcgacataatcatgcccatcgagcggaaaaagcgggagaagcgacacgagcccttgtagataagattacctccaatccagataatcgagtagcacttgtgacttatggctcaactatctttgacggttcagaagctactgtggaaaaaggggtagcagatgcgaacggaaaaatattgaatgactcagctttatggacgttcgatcgtacgacgtttacagctaaaacttataattatagctttttaaatctcacatcagatcctactgatattcaaactattaaggataggattccatcagatgcagaggaattgaacaaagacaaattgatgtatcaattcggcgcgacttttacccagaaggctttgatgaccgctgatgatatcttgacaaagcaggcaagaccaaacagtaaaaaggttattttccacattacagatggtgttccgactatgtcatatccaattaattttaaatatacaggaacgacgcaatcgtacagaactcagctgaataattttaaagcaaaaactccaaatagtagcgggatattactggaggactttgttacatggtcagcagatggtgaacataagattgttcgtggagatggtgaaagttatcagatgtttacgaagaaacctgtaacagaccaatacggagttcatcaaatactttcaatcacctccatggagcagagagctaaattagtttcagcgggatataggttctatggaactgacttgtatttatattggcgtgatagtattctagcctatccatttaactctagtaccgattggattaccaaccatggtgaccctacgacttggtattataacggaaatatggctcaggatggctatgatgtcttcactgttggggttggtgtaaacggggatcctggtacggatgaagcaacggctactagatttatgcagagcatctctagttctcctgacaactacactaacgtagcagatccatctcagattttacaagaattgaatcgctacttctatactatcgtcaatgagaagaaatctatcgaaaatggtacgattacagacccgatgggtgaactaattgatttccaattgggagcagatggaaggtttgatccagcggattacactttaactgcaaacgatggtagttcgttggtgaataatgtccctactgggggaccacaaaatgatggtggcttgctaaaaaatgcaaaagtgttctatgatacgactgagaaaaggattcgtgtaacaggtttgtaccttggaacgggtgaaaaagttacattgacttataatgttcgcttgaatgaccaatttgtaagcaataaattctatgacacgaatggtcgaacaaccctacaccctaaggaagtagaaaagaacacagtgcgcgacttcccgattcctaagattcgtgatgtacgaaagtatccagaaatcacaattccaaaagagaaaaaacttggtgaaattgagtttattaagatcaataagaatgataaaaaaccactgagagatgcggtctttagtcttcaaaaacaacatccggattatccagatatttatggagctattgatcaaaatggcacttatcaaaatgtgagaacaggtgaagatggtaagttgacctttaaaaatctgtcagatgggaaatatcgattatttgaaaattctgaaccagctggttataaacccgttcaaaataagcctatcgttgccttccaaatagtaaatggagaagtcagagatgtgacttcaatcgttccacaagatataccagcgggttacgagtttacgaatgataagcactatatcacaaatgagccaattcctccaaaaagagaatatcctcgaactggtggtatcggaatgttgccattctatctgataggttgcatgatgatgggaggagttctattatacacacggaaacatccgtaaagtgtagcaatgagaaatgataatatcgatactctgagcgatacttttaagaagtagcactcaagaagagatttaagtttacttggtgaaaacagttttcttcgccaagtaaaccaccattgaaaggggagatgttttcgaaaacttgcacagaaaaaaggattattattgtcatgtgtaattcattacattgctcacagttgattttaagagatatgaataaggagaaatcatgaaatcaatcaacaaatttttaacaatgcttgctgccttattactgacagcgagtagcctgttttcagctgcaacagtttttgcggcggacaatgttagtacagcaccagatgctgttactaaaactttaacaatccataagttactgctctcagaagatgatttaaagacttgggatacaaacggtcctaaaggatatgatggaactcaatctagtttaaaagatttaactggagttgtagctgaggaaattccaaatgtatactttgaattacaaaagtataatttgactgatggtaaggaaaaagaaaatcttaaagatgatagtaaatggacaacagttcatggtggtttgacaactaaagatggacttaaaattgaaaccagtactcttaaaggtgtgtatcgtattcgtgaggatagaacaaagactacctatgttggtcctaatgggcaagtattaacaggttcaaaagccgtacctgctcttgtaactcttccacttgttaacaataatggtacagtaattgatgcacatgttttccctaaaaattcatataataaaccagttgtagataaaagaattgctgatactttgaattataacgatcaaaatggtctgtctatcggtactaaaatcccatatgttgttaatacaacaattccaagtaatgcaacatttgcaacttcattttggtcagatgaaatgacagaaggtctaacttataatgaagagtaacaattactttgaataatgtagctatggatcaagctgattatgaagtcactaaaggaaataatggctttaacttaaaattaacagaagcaggtttagctaaaattaatggtaaggatgcagaccaaaaaatccaaattacttactcagctactttgaactcacttgctgttgcagacattcctgaaagtaacgatattacatatcattacggaaatcatcaagatcatgggaatactccaaaaccaactaaacctaataatggtcaaattacagtaactaagacatgggacagtcaacctgctcctgagggggtgaaagcgactgttcaacttgtaaatgccaagactggtgagaaagtcggtgctcctgtagaactttcagaaaataattggacatatacttggagtggtctagataattctattgaatacaaagttgaagaagaatataatggatactcagctgaatacacagtagagagcaaagggaagttgggggtaaaaaactggaaagataataacccagctccaatcaatctgaagaaccacgtgtaaaaacatacggtaaaaagtttgtcaaagtagaccaaaaagatactcgtctagaaaatgcgcagttcgttgttaaaaaagcagatagcaataaatatattgcctttaagtcaactgcacaacaagctgcagatgaaaaagcagcagcaactgcaaaacaaaaattggatgcagcggtagcagcttacacaaatgctgcagataagcaagccgctcaagctctagtagatcaagcacagcaagaatacaatgtagcttacaaagaagccaaatttggttatgttgaagtagctggaaaagatgaagcaatggttcttacttctaatacggatggtcaattccaaatttcaggtcttgctgctggtacttataaattagaagaaattaaagctccagaaggttttgcgaaaattgatgatgtagaatttgttgttggagcaggttcttggaatcaaggtgagtttaattacttaaaagatgttcaaaagaatgacgctacaaaagtagtcaacaaaaaaatcactatcccacaaacgggtggtattggtacaattatctttgctgtagcgggggctgcgattatgggtattgcagtgtacgcatatgttaaaaacaacaaagatgaggatcaacttgcttaagtaagagagaaaggagccattgatgacaatgcagaaaatgcagaaaatgattagtcgtatcttctttgttatggctctgtgtttttctcttgtatggggtgcacatgcagtccaagcgcaagaagatcacacgttggtcttgcaattggagaactatcaggaggtggttagtcaattgccatctcgtgatggtcatcggttgcaagtatggaagttggatgattcgtattcctatgatgatcgggtgcaaattgtaagagacttgcattcgtgggatgagaataaactttcttctttcaaaaagacttcgtttgagatgaccttccttgagaatcagattgaagtatctcatattccaaatggtctttactatgttcgctctattatccagacggatgcggtttcttatccagctgaatttctttttgaaatgacagatcaaacggtagagcctttggtcattgtagcgaaaaaaacagatacaatgacaacaaaggtgaagctgataaaggtggatcaagaccacaatcgcttggagggtgtcggctttaaattggtatcagtagcaagagatggttctgaaaaagaggttcccttgattggagaataccgttacagttcttctggtcaagtagggagaactctctatactgataaaaatggagagatttttgtgacaaatcttcctcttgggaactatcgtttcaaggaggtggagccactggcaggctatgctgttacgacgctggatacggatgtccagctggtagatcatcagctggtgacgattacggttgtcaatcagaaattaccacgtggcaatgttgactttatgaaggtggatggtcggaccaatacctctcttcaaggggcaatgttcaaagtcatgaaagaagaaagcggacactatactcctgttcttcaaaatggtaaggaagtagttgtaacatcagggaaagatggtcgtttccgagtggaaggtctagagtatgggacatactatttatgggagctccaagctccaactggttatgttcaattaacatcgcctgtttcctttacaatcgggaaagatactcgtaaggaactggtaacagtggttaaaaataacaagcgaccacggattgatgtgccagatacaggggaagaaaccttgtatatcttgatgcttgttgccattttgttgtttggtagtggttattatcttacgaaaaaaccaaataactgatattcaatgtacatcattatgaaaaagatagcaggctgaagggaagaccagagtactctgaggtgatgttaatcaggaatcatggtgatgtggcatgaatcacaataacggatatgaggctgggcagattgtgccagcctcattgtgggttattgtttgtaaaacgataggactggtctggtaatcattttaggaatggacaggactgggattctgatttaaaatggatggtgaatcagaaagaaatgagattttctcgtttctcttagcagataggattgtctgttaggaaaagcgataaaatgatgagtttgaagataaagggatgctgataaaaatggtaaaaacaaaaaagcaaaaacgaaataatctcctattaggagtggtatttttcattggaatggcggtaatggcgtatccgctggtgtctcgcttgtattatcgagtggaatcaaatcaacaaattgctgactttgataaggaaaaagcaacgttggatgaggctgacattgatgaacgaatgaaattggcacaagccttcaatgactctttgaataatgtagtgagtggcgatccttggtcggaagaaatgaagaaaaaagggcgagcagagtatgcacgtatgttagaaatccatgagcggatggggcatgtggaaatccccgttattgacgtggatttgccggtttatgctggtactgctgaagaggtattgcagcaaggggctgggcatctagagggaacttctctgccgatcggaggcaattcgacccatgcggtgattacggcacatacaggtttgccaacagctaagatgtttacggatttgaccaaacttaaagttggggataagttttatgtgcacaatatcaaggaagtgatggcctatcaagtggatcaagtaaaggtgattgagccgacgaactttgatgatttattgattgtaccaggtcatgattatgtgaccttgctgacttgtacgccatacatgatcaatacccatcgtctattggttcgggggcatcggataccgtacgtagcagaggttgaggaagaatttattgcagcaaacaaactcagtcatctctatcgctacctgttttatgtggcagttggtttgattgtgattcttttatggattattcgacgcttgcgcaagaagaaaaaacaaccggaaaaggctttgaaggcgctgaaagcagcaaggaaggaagtgaaggtggaggatggacaacagtagacgttcacgaaaaaaaggcacaaaaaagaagaaacatccgctgatccttcttctgattttcttagtaggattcgccgttgcgatatatccattggtgtctcgttattattatcgtattgagtcaaacgaggttattaaagagtttgatgagacggtttcccagatggataaggcagaacttgaggagcgttggcgcttggctcaagccttcaatgcgaccttgaaaccatctgaaattcttgatccttttacagagcaagagaaaaagaaaggcgtctcagaatatgccaatatgctaaaggtccatgagcggattggctatgtggaaattcctgcgattgatcaggaaattccgatgtatgtcggaacgagtgaggaaattcttcagaagggcgcaggattgctagagggagcttcgttaccggttggtggtgaaaatacccacacagttgtcactgctcatagaggattaccgacggcagaactgtttagtcaattggataagatgaaaaaaggggatgtcttttatcttcacgttttagaccaggtgttggcctaccaagtggatcagattttgacggttgagccaaatgactttgagcctgtcttgattcaacatggggaagattatgcgaccttgttgacctgtacaccgtatatgattaacagtcatcgtctgttggtacgtgggaagcggattccgtatacggcaccaattgcagagcgaaatcgagcggtgagagagcgtgggcaattctggttgtggttattgctagcggcgttggttatgattctggtattgagttacggggtgtatcgtcatcgtcgcattgtcaaagggctagaaaaacaattggaggagcatcatgtcaaaggctaagctacagaaattactagggtatttgctgatgctggtagcattggtgattcctgtttattgttttgggcagatggtgttacagtctttaggacaagtaaaaggtcatgagatattttcagaatctgtgacggccgacagttaccaagagcaattgcaacggtcgcttgattacaatcaacgcttggattcgcaaaatcgtattgtagatccttttttggcggaagggtatgaggtaaattaccaagtgtctgacgatcctgatgcagtctacggctatttgtcgattccgagtttggaaatcatggagccagtttatctaggagcggattaccatcatttagcaatggggttggcccatgtggatgggacgcctcttcctgttgagggaaaagggattcgttcagtgattgctgggcaccgtgcagaaccaagccatgtctttttccgccatttggatcagctaaaagttggagatgctctttattatgataatggccaggaaattgtagaatatcagatgatggacacagagattattttaccgtcggaatgggaaaaattagaatcggttagctctaaaaatatcatgaccttgataacctgcgatccgattcctacctttaataaacgcttattagtgaattttgaacgagtcgctgtttatcaaaaatcagatccacaaacagctgcagttgcgagggttgcttttacgaaagaaggacaatctgtatcgcgtgttgcaacctctcaatggttgtaccgtgggctagtggtactggcatttctgggaatcctgtttgttttgtggaagctagcacgtttactacgagggaaataaaaagaaatgaaaggaaagctaaggctgttcctttttccggctctttgtcaactgtagggg

SEQ ID NO: 496 - DNA, 11447 bp, S. pneumoniae
gtttaggcgcttttcattataagtcttatgggacttttttgatactcaaaaagccctataatctccacagtgggatttacccactacagaaattatagagccagaaaaaacacttttgttcactagcagaaactagagagcagaagtgtttttctgttcagatttacccaaaactgggaaatatggggataagaatagagatggcttaggaagcccctttttgtgtgtagacagtacgatgaacttataacaaatagtgagcctttttagcaatcattgcgacccgtttgtcaaaagcctcttttcggatatctacaattgtctgatagatgagacgctgttggctaacatgcaaatctaaggcaatcgtcaaaaagtgatgtttccctttgggatactgctttttaacgtaaggcaggtattctttcgttgtaataataatcaatggctctgtcaaatgctcctctgaaggaggaggactaattagaatattgtatcctgtaacagaggcaactttgtcagtaaaattccgtaaaataatggactttattaagtttacatctgcttgattatttaaaatgataaaaatcgggatagcaggtagtgaggaaaagatggtttctgtcaagtagagtgagaaaaggtacagccgatgctggtcgataactccttcaatcttctgctcagtcatccactcttgaacaattgctttcgaaatatgatacagtggcttgtcgctttcaatcccataatgttcgtaataattataatagggaactagattttgtaaaccaaacaaaaacgttcttgttaagaaagtcagtgctgttaaaaaagaaagagaattcgaaatgtcatttcctaagatattcttgaacttggatagtagatgctttcctcttgtatgctgaagaatcagttgaatagtatgagtctttttttcttgattccatttgtccttggaaaacgaagaattagcagaacaataaaccaaaaagatataatccagttcttcctgagtaaaagtcatgttggcatgtggctctaagtaagtttggcaatgttccatcaaaatcggatacataaagaggttttttaatttttcaaactctttggactcagggaactcaagtggaaattcccgacgtttccaagtgagtgccactagtatgctaaaatgaacatactcgtcaggtgtgatttctaacagttcatgactgagttgagaattagactgcacaatcatatgtgtgacccaatccatacttccatcattcaaatcataaatctcaataccaaaatgaaactggaggagtgcaattaaaaaacgaatgcgatattcaggaccaactacttgatttttcacaaggtccaaacctactgaacgtagtaacaagccacacttttgtcgtacgcggtagcctgttgcgatggaaatatactctttttgtgtaaattcgttaaagctttgattaccttgtagtagaaagaagcggagtatttttaaaatagttgattggttataaagctgatggaagtaataattcgtttgatgagaatggtgttcgattaattgaacttgttgcgtatctaaattaaatgtcaactcttcctcgaatgtttcttgtaattcctgcaaaatgcttaggagacttttagattgtaatgaagttaaagtagacagttcatctagttcaatagaccgaatatccaataatatatttaaaatggtaattttatctgtaattcttttttcaatgtatttgtttagcatagttaccgaatcttagttgcatatagataattttaattattataatacaaaagaaactaattgtcttgtcaaaaaggttgtggaatttccgactttattgataaaacagcatgtaataaaaggcattttaaagatagtaatgagtattggtggagttttatggcttattttttttattagaaaatatttttttatcaaatattgtcgttctataaaaaaatatgtgataaaaatatctattgtgatggaagttgttttaatttatactaggatagttaatagtaatactatactatactatattgtatacaagtgtgtcattgccaggttgagaagatagctataacgcacttttatacgcttttgctacgtttgttagtgaacggattaactcagtgagataaattttatcagaacataagtaatccgtttcttcgtgtatacagattgaaagtacctatgaatcatagaaggattaacttgttctatgaataatgcttaacagggagacacacatgaaaaaagtaagaaagatatttcagaaggcagttgcaggactgtgctgtatatctcagttgacagctttttcttcgatagttgctttagcagaaacgcctgaaaccagtccagcgataggaaaagtagtgattaaggagacaggcgaaggaggagcgcttctaggagatgccgtctttgagttgaaaaacaatacggatggcacaactgtttcgcaaaggacagaggcgcaaacaggagaagcgatattttcaaacataaaacctgggacatacaccttgacagaagcccaacctccagttggttataaaccctctactaaacaatggactgttgaagttgagaagaatggtcggacgactgtccaaggtgaacaggtagaaaatcgagaagaggctctatctgaccagtatccacaaacagggacttatccagatgttcaaacaccttatcagattattaaggtagatggttcggaaaaaaacggacagcacaaggcgttgaatccgaatccatatgaacgtgtgattccagaaggtacactttcaaagagaatttatcaagtgaataatttggatgataaccaatatggaatcgagttgacggttagtggtaaaacgacggttgaaacgaaagaagcctctactccgctagatgttgttattctattagataactccaatagtatgagtaatattcgacataatcatgcccatcgagcggaaaaagcgggagaagcgacacgagcccttgtagataagattacctccaatccagataatcgagtagcacttgtgacttatggctcaactatctttgacggttcagaagctactgtggaaaaaggggtagcagatgcgaacggaaaaatattgaatgactcagctttatggacgttcgatcgtacgacgtttacagctaaaacttataattatagctttttaaatctcacatcagatcctactgatattcaaactattaaggataggattccatcagatgcagaggaattgaacaaagacaaattgatgtatcaattcggcgcgacttttacccagaaggctttgatgaccgctgatgatatcttgacaaagcaggcaagaccaaacagtaaaaaggttattttccacattacagatggtgttccgactatgtcatatccaattaattttaaatatacaggaacgacgcaatcgtacagaactcagctgaataattttaaagcaaaaactccaaatagtagcgggatattactggaggactttgttacatggtcagcagatggtgaacataagattgttcgtggagatggtgaaagttatcagatgtttacgaagaaacctgtaacagaccaatacggagttcatcaaatactttcaatcacctccatggagcagagagctaaattagtttcagcgggatataggttctatggaactgacttgtatttatattggcgtgatagtattctagcctatccatttaactctagtaccgattggattaccaaccatggtgaccctacgacttggtattataacggaaatatggctcaggatggctatgatgtcttcactgttggggttggtgtaaacggggatcctggtacggatgaagcaacggctactagatttatgcagagcatctctagttctcctgacaactacactaacgtagcagatccatctcagattttacaagaattgaatcgctacttctatactatcgtcaatgagaagaaatctatcgaaaatggtacgattacagacccgatgggtgaactaattgatttccaattgggagcagatggaaggtttgatccagcggattacactttaactgcaaacgatggtagttcgttggtgaataatgtccctactgggggaccacaaaatgatggtggcttgctaaaaaatgcaaaagtgttctatgatacgactgagaaaaggattcgtgtaacaggtttgtaccttggaacgggtgaaaaagttacattgacttataatgttcgcttgaatgaccaatttgtaagcaataaattctatgacacgaatggtcgaacaaccctacaccctaaggaagtagaaaagaacacagtgcgcgacttcccgattcctaagattcgtgatgtacgaaagtatccagaaatcacaattccaaaagagaaaaaacttggtgaaattgagtttattaagatcaataagaatgataaaaaaccactgagagatgcggtctttagtcttcaaaaacaacatccggattatccagatatttatggagctattgatcaaaatggcacttatcaaaatgtgagaacaggtgaagatggtaagttgacctttaaaaatctgtcagatgggaaatatcgattatttgaaaattctgaaccagctggttataaacccgttcaaaataagcctatcgttgccttccaaatagtaaatggagaagtcagagatgtgacttcaatcgttccacaagatataccagcgggttacgagtttacgaatgataagcactatatcacaaatgagccaattcctccaaaaagagaatatcctcgaactggtggtatcggaatgttgccattctatctgataggttgcatgatgatgggaggagttctattatacacacggaaacatccgtaaagtgtagcaatgagaaatgataatatcgatactctgagcgatacttttaagaagtagcactcaagaagagatttaagtttacttggtgaaaacagttttcttcgccaagtaaaccaccattgaaaggggagatgttttcgaaaacttgcacagaaaaaaggattattattgtcatgtgtaattcattacattgctcacagttgattttaagagatatgaataaggagaaatcatgaaatcaatcaacaaatttttaacaatgcttgctgccttattactgacagcgagtagcctgttttcagctgcaacagtttttgcggcggacaatgttagtacagcaccagatgctgttactaaaactttaacaatccataagttactgctctcagaagatgatttaaagacttgggatacaaacggtcctaaaggatatgatggaactcaatctagtttaaaagatttaactggagttgtagctgaggaaattccaaatgtatactttgaattacaaaagtataatttgactgatggtaaggaaaaagaaaatcttaaagatgatagtaaatggacaacagttcatggtggtttgacaactaaagatggacttaaaattgaaaccagtactcttaaaggtgtgtatcgtattcgtgaggatagaacaaagactacctatgttggtcctaatgggcaagtattaacaggttcaaaagccgtacctgctcttgtaactcttccacttgttaacaataatggtacagtaattgatgcacatgttttccctaaaaattcatataataaaccagttgtagataaaagaattgctgatactttgaattataacgatcaaaatggtctgtctatcggtactaaaatcccatatgttgttaatacaacaattccaagtaatgcaacatttgcaacttcattttggtcagatgaaatgacagaaggtctaacttataatgaagatgtaacaattactttgaataatgtagctatggatcaagctgattatgaagtcactaaaggaaataatggctttaacttaaaattaacagaagcaggtttagctaaaattaatggtaaggatgcagaccaaaaaatccaaattacttactcagctactttgaactcacttgctgttgcagacattccygaaagtaacgatattacatatcattacggaaatcatcaagatcatgggaatactccaaaaccaactaaacctaataatggtcaaattacagtaactaagacatgggacagtcaacctgctcctgagggggtgaaagcgactgttcaacttgtaaatgccaagactggtgagaaagtcggtgctcctgtagaactttcagaaaataattggacatatacttggagtggtctagataattctattgaatacaaagttgaagaagaatataatggatactcagctgaatacacagtagagagcaaagggaagttgggggtaaaaaactggaaagataataacccagctccaatcaatcctgaagaaccacgtgtaaaaacatacggtaaaaagtttgtcaaagtagaccaaaaagatactcgtctagaaaatgcgcagttcgttgttaaaaaagcagatagcaataaatatattgcctttaagtcaactgcacaacaagctgcagatgaaaaagcagcagcaactgcaaaacaaaaattggatgcagcggtagcagcttacacaaatgctgcagataagcaagccgctcaagctctagtagatcaagcacagcaagaatacaatgtagcttacaaagaagccaaatttggttatgttgaagtagctggaaaagatgaagcaatggttcttacttctaatacggatggtcaattccaaatttcaggtcttgctgctggtacttataaattagaagaaattaaagctccagaaggttttgcgaaaattgatgatgtagaatttgttgttggagcaggttcttggaatcaaggtgagtttaattacttaaaagatgttcaaaagaatgacgctacaaaagtagtcaacaaaaaaatcactatcccacaaacgggtggtattggtacaattatctttgctgtagcgggggctgcgattatgggtattgcagtgtacgcatatgttaaaaacaacaaagatgaggatcaacttgcttaagtaagagagaaaggagccattgatgacaatgcagaaaatgcagaaaatgattagtcgtatcttctttgttatggctctgtgtttttctcttgtatggggtgcacatgcagtccaagcgcaagaagatcacacgttggtcttgcaattggagaactatcaggaggtggttagtcaattgccatctcgtgatggtcatcggttgcaagtatggaagttggatgattcgtattcctatgatgatcgggtgcaaattgtaagagacttgcattcgtgggatgagaataaactttcttctttcaaaaagacttcgtttgagatgaccttccttgagaatcagattgaagtatctcatattccaaatggtctttactatgttcgctctattatccagacggatgcggtttcttatccagctgaatttctttttgaaatgacagatcaaacggtagagcctttggtcattgtagcgaaaaaaacagatacaatgacaacaaaggtgaagctgataaaggtggatcaagaccacaatcgcttggagggtgtcggctttaaattggtatcagtagcaagagatggttctgaaaaagaggttcccttgattggagaataccgttacagttcttctggtcaagtagggagaactctctatactgataaaaatggagagatttttgtgacaaatcttcctcttgggaactatcgtttcaaggaggtggagccactggcaggctatgctgttacgacgctggatacggatgtccagctggtagatcatcagctggtgacgattacggttgtcaatcagaaattaccacgtggcaatgttgactttatgaaggtggatggtcggaccaatacctctcttcaaggggcaatgttcaaagtcatgaaagaagaaagcggacactatactcctgttcttcaaaatggtaaggaagtagttgtaacatcagggaaagatggtcgtttccgagtggaaggtctagagtatgggacatactatttatgggagctccaagctccaactggttatgttcaattaacatcgcctgtttcctttacaatcgggaaagatactcgtaaggaactggtaacagtggttaaaaataacaagcgaccacggattgatgtgccagatacaggggaagaaaccttgtatatcttgatgcttgttgccattttgttgtttggtagtggttattatcttacgaaaaaaccaaataactgatattcaatgtacatcattatgaaaaagatagcaggctgaagggaagaccagagtactctgaggtgatgttaatcaggaatcatggtgatgtggcatgaatcacaataacggatatgaggctgggcagattgtgccagcctcattgtgggttattgtttgtaaaacgataggactggtctggtaatcattttaggaatggacaggactgggattctgatttaaaatggatggtgaatcagaaagaaatgagattttctcgtttctcttagcagataggattgtctgttaggaaaagcgataaaatgatgagtttgaagataaagggatgctgataaaaatggtaaaaacaaaaaagcaaaaacgaaataatctcctattaggagtggtatttttcattggaatggcggtaatggcgtatccgctggtgtctcgcttgtattatcgagtggaatcaaatcaacaaattgctgactttgataaggaaaaagcaacgttggatgaggctgacattgatgaacgaatgaaattggcacaagccttcaatgactctttgaataatgtagtgagtggcgatccttggtcggaagaaatgaagaaaaaagggcgagcagagtatgcacgtatgttagaaatccatgagcggatggggcatgtggaaatccccgttattgacgtggatttgccggtttatgctggtactgctgaagaggtattgcagcaaggggctgggcatctagagggaacttctctgccgatcggaggcaattcgacccatgcggtgattacggcacatacaggtttgccaacagctaagatgtttacggatttgaccaaacttaaagttggggataagttttatgtgcacaatatcaaggaagtgatggcctatcaagtggatcaagtaaaggtgattgagccgacgaactttgatgatttattgattgtaccaggtcatgattatgtgaccttgctgacttgtacgccatacatgatcaatacccatcgtctattggttcgggggcatcggataccgtacgtagcagaggttgaggaagaatttattgcagcaaacaaactcagtcatctctatcgctacctgttttatgtggcagttggtttgattgtgattcttttatggattattcgacgcttgcgcaagaagaaaaaacaaccggaaaaggctttgaaggcgctgaaagcagcaaggaaggaagtgaaggtggaggatggacaacagtagacgttcacgaaaaaaaggcacaaaaaagaagaaacatccgctgatccttcttctgattttcttagtaggattcgccgttgcgatatatccattggtgtctcgttattattatcgtattgagtcaaacgaggttattaaagagtttgatgagacggtttcccagatggataaggcagaacttgaggagcgttggcgcttggctcaagccttcaatgcgaccttgaaaccatctgaaattcttgatccttttacagagcaagagaaaaagaaaggcgtctcagaatatgccaatatgctaaaggtccatgagcggattggctatgtggaaattcctgcgattgatcaggaaattccgatgtatgtcggaacgagtgaggaaattcttcagaagggcgcaggattgctagagggagcttcgttaccggttggtggtgaaaatacccacacagttgtcactgctcatagaggattaccgacggcagaactgtttagtcaattggataagatgaaaaaaggggatgtcttttatcttcacgttttagaccaggtgttggcctaccaagtggatcagattttgacggttgagccaaatgactttgagcctgtcttgattcaacatggggaagattatgcgaccttgttgacctgtacaccgtatatgattaacagtcatcgtctgttggtacgtgggaagcggattccgtatacggcaccaattgcagagcgaaatcgagcggtgagagagcgtgggcaattctggttgtggttattgctagcggcgttggttatgattctggtattgagttacggggtgtatcgtcatcgtcgcattgtcaaagggctagaaaaacaattggaggagcatcatgtcaaaggctaagctacagaaattactagggtatttgctgatgctggtagcattggtgattcctgtttattgttttgggcagatggtgttacagtctttaggacaagtaaaaggtcatgagatattttcagaatctgtgacggccgacagttaccaagagcaattgcaacggtcgcttgattacaatcaacgcttggattcgcaaaatcgtattgtagatccttttttggcggaagggtatgaggtaaattaccaagtgtctgacgatcctgatgcagtctacggctatttgtcgattccgagtttggaaatcatggagccagtttatctaggagcggattaccatcatttagcaatggggttggcccatgtggatgggacgcctcttcctgttgagggaaaagggattcgttcagtgattgctgggcaccgtgcagaaccaagccatgtctttttccgccatttggatcagctaaaagttggagatgctctttattatgataatggccaggaaattgtagaatatcagatgatggacacagagattattttaccgtcggaatgggaaaaattagaatcggttagctctaaaaatatcatgaccttgataacctgcgatccgattcctacctttaataaacgcttattagtgaattttgaacgagtcgctgtttatcaaaaatcagatccacaaacagctgcagttgcgagggttgcttttacgaaagaaggacaatctgtatcgcgtgttgcaacctctcaatggttgtaccgtgggctagtggtactggcatttctgggaatcctgtttgttttgtggaagctagcacgtttactacgagggaaataaaaagaaatgaaaggaaagctaaggctgttcctttttccggctctttgtcaactgtagtgggttgaaaaaaagctaagctcgagaaaggacaaattttgtcctttcttttttgatattcagagcgataaaaatccgttttttgaagttttcaaa

SEQ ID NO: 497 - DNA, 11351 bp, S. pneumoniae
gtttaggcgcttttcattataagtcttatgggacttttttgatactcaaaaagccctataatctccacagtgggatttacccactacagaaattatagagccagaaaaaacacttttgttcactagcagaaactagagagcagaagtgtttttctgttcagatttacccaaaactgggaaatatggggataagaatagagatggcttaggaagcccctttttgtgtgtagacagtacgatgaacttataacaaatagtgagcctttttagcaatcattgcgacccgtttgtcaaaagcctcttttcggatatctacaattgtctgatagatgagacgctgttggctaacatgcaaatctaaggcaatcgtcaaaaagtgatgtttccctttgggatactgctttttaacgtaaggcaggtattctttcgttgtaataataatcaatggctctgtcaaatgctcctctgaaggaggaggactaattagaatattgtatcctgtaacagaggcaactttgtcagtaaaattccgtaaaataatggactttattaagtttacatctgcttgattatttaaaatgataaaaatcgggatagcaggtagtgaggaaaagatggtttctgtcaagtagagtgagaaaaggtacagccgatgctggtcgataactccttcaatcttctgctcagtcatccactcttgaacaattgctttcgaaatatgatacagtggcttgtcgctttcaatcccataatgttcgtaataattataatagggaactagattttgtaaaccaaacaaaaacgttcttgttaagaaagtcagtgctgttaaaaaagaaagagaattcgaaatgtcatttcctaagatattcttgaacttggatagtagatgctttcctcttgtatgctgaagaatcagttgaatagtatgagtctttttttcttgattccatttgtccttggaaaacgaagaattagcagaacaataaaccaaaaagatataatccagttcttcctgagtaaaagtcatgttggcatgtggctctaagtaagtttggcaatgttccatcaaaatcggatacataaagaggttttttaatttttcaaactctttggactcagggaactcaagtggaaattcccgacgtttccaagtgagtgccactagtatgctaaaatgaacatactcgtcaggtgtgatttctaacagttcatgactgagttgagaattagactgcacaatcatatgtgtgacccaatccatacttccatcattcaaatcataaatctcaataccaaaatgaaactggaggagtgcaattaaaaaacgaatgcgatattcaggaccaactacttgatttttcacaaggtccaaacctactgaacgtagtaacaagccacacttttgtcgtacgcggtagcctgttgcgatggaaatatactctttttgtgtaaattcgttaaagctttgattaccttgtagtagaaagaagcggagtatttttaaaatagttgattggttataaagctgatggaagtaataattcgtttgatgagaatggtgttcgattaattgaacttgttgcgtatctaaattaaatgtcaactcttcctcgaatgtttcttgtaattcctgcaaaatgcttaggagacttttagattgtaatgaagttaaagtagacagttcatctagttcaatagaccgaatatccaataatatatttaaaatggtaattttatctgtaattcttttttcaatgtatttgtttagcatagttaccgaatcttagttgcatatagataattttaattattataatacaaaagaaactaattgtcttgtcaaaaaggttgtggaatttccgactttattgataaaacagcatgtaataaaaggcattttaaagatagtaatgagtattggtggagttttatggcttattttttttattagaaaatatttttttatcaaatattgtcgttctataaaaaaatatgtgataaaaatatctattgtgatggaagttgttttaatttatactaggatagttaatagtaatactatactatactatattgtatacaagtgtgtcattgccaggttgagaagatagctataacgcacttttatacgcttttgctacgtttgttagtgaacggattaactcagtgagataaattttatcagaacataagtaatccgtttcttcgtgtatacagattgaaagtacctatgaatcatagaaggattaacttgttctatgaataatgcttaacagggagacacacatgaaaaaagtaagaaagatatttcagaaggcagttgcaggactgtgctgtatatctcagttgacagctttttcttcgatagttgctttagcagaaacgcctgaaaccagtccagcgataggaaaagtagtgattaaggagacaggcgaaggaggagcgcttctaggagatgccgtctttgagttgaaaaacaatacggatggcacaactgtttcgcaaaggacagaggcgcaaacaggagaagcgatattttcaaacataaaacctgggacatacaccttgacagaagcccaacctccagttggttataaaccctctactaaacaatggactgttgaagttgagaagaatggtcggacgactgtccaaggtgaacaggtagaaaatcgagaagaggctctatctgaccagtatccacaaacagggacttatccagatgttcaaacaccttatcagattattaaggtagatggttcggaaaaaaacggacagcacaaggcgttgaatccgaatccatatgaacgtgtgattccagaaggtacactttcaaagagaatttatcaagtgaataatttggatgataaccaatatggaatcgagttgacggttagtggtaaaacgacggttgaaacgaaagaagcctctactccgctagatgttgttattctattagataactccaatagtatgagtaatattcgacataatcatgcccatcgagcggaaaaagcgggagaagcgacacgagcccttgtagataagattacctccaatccagataatcgagtagcacttgtgacttatggctcaactatctttgacggttcagaagctactgtggaaaaaggggtagcagatgcgaacggaaaaatattgaatgactcagctttatggacgttcgatcgtacgacgtttacagctaaaacttataattatagctttttaaatctcacatcagatcctactgatattcaaactattaaggataggattccatcagatgcagaggaattgaacaaagacaaattgatgtatcaattcggcgcgacttttacccagaaggctttgatgaccgctgatgatatcttgacaaagcaggcaagaccaaacagtaaaaaggttattttccacattacagatggtgttccgactatgtcatatccaattaattttaaatatacaggaacgacgcaatcgtacagaactcagctgaataattttaaagcaaaaactccaaatagtagcgggatattactggaggactttgttacatggtcagcagatggtgaacataagattgttcgtggagatggtgaaagttatcagatgtttacgaagaaacctgtaacagaccaatacggagttcatcaaatactttcaatcacctccatggagcagagagctaaattagtttcagcgggatataggttctatggaactgacttgtatttatattggcgtgatagtattctagcctatccatttaactctagtaccgattggattaccaaccatggtgaccctacgacttggtattataacggaaatatggctcaggatggctatgatgtcttcactgttggggttggtgtaaacggggatcctggtacggatgaagcaacggctactagatttatgcagagcatctctagttctcctgacaactacactaacgtagcagatccatctcagattttacaagaattgaatcgctacttctatactatcgtcaatgagaagaaatctatcgaaaatggtacgattacagacccgatgggtgaactaattgatttccaattgggagcagatggaaggtttgatccagcggattacactttaactgcaaacgatggtagttcgttggtgaataatgtccctactgggggaccacaaaatgatggtggcttgctaaaaaatgcaaaagtgttctatgatacgactgagaaaaggattcgtgtaacaggtttgtaccttggaacgggtgaaaaagttacattgacttataatgttcgcttgaatgaccaatttgtaagcaataaattctatgacacgaatggtcgaacaaccctacaccctaaggaagtagaaaagaacacagtgcgcgacttcccgattcctaagattcgtgatgtacgaaagtatccagaaatcacaattccaaaagagaaaaaacttggtgaaattgagtttattaagatcaataagaatgataaaaaaccactgagagatgcggtctttagtcttcaaaaacaacatccggattatccagatatttatggagctattgatcaaaatggcacttatcaaaatgtgagaacaggtgaagatggtaagttgacctttaaaaatctgtcagatgggaaatatcgattatttgaaaattctgaaccagctggttataaacccgttcaaaataagcctatcgttgccttccaaatagtaaatggagaagtcagagatgtgacttcaatcgttccacaagatataccagcgggttacgagtttacgaatgataagcactatatcacaaatgagccaattcctccaaaaagagaatatcctcgaactggtggtatcggaatgttgccattctatctgataggttgcatgatgatgggaggagttctattatacacacggaaacatccgtaaagtgtagcaatgagaaatgataatatcgatactctgagcgatacttttaagaagtagcactcaagaagagatttaagtttacttggtgaaaacagttttcttcgccaagtaaaccaccattgaaaggggagatgttttcgaaaacttgcacagaaaaaaggattattattgtcatgtgtaattcattacattgctcacagttgattttaagagatatgaataaggagaaatcatgaaatcaatcaacaaatttttaacaatgcttgctgccttattactgacagcgagtagcctgttttcagctgcaacagtttttgcggcggacaatgttagtacagcaccagatgctgttactaaaactttaacaatccataagttactgctctcagaagatgatttaaagacttgggatacaaacggtcctaaaggatatgatggaactcaatctagtttaaaagatttaactggagttgtagctgaggaaattccaaatgtatactttgaattacaaaagtataatttgactgatggtaaggaaaaagaaaatcttaaagatgatagtaaatggacaacagttcatggtggtttgacaactaaagatggacttaaaattgaaaccagtactcttaaaggtgtgtatcgtattcgtgaggatagaacaaagactacctatgttggtcctaatgggcaagtattaacaggttcaaaagccgtacctgctcttgtaactcttccacttgttaacaataatggtacagtaattgatgcacatgttttccctaaaaattcatataataaaccagttgtagataaaagaattgctgatactttgaattataacgatcaaaatggtctgtctatcggtactaaaatcccatatgttgttaatacaacaattccaagtaatgcaacatttgcaacttcattttggtcagatgaaatgacagaaggtctaacttataatgaagatgtaacaattactttgaataatgtagctatggatcaagctgattatgaagtcactaaaggaaataatggctttaacttaaaattaacagaagcaggtttagctaaaattaatggtaaggatgcagaccaaaaaatccaaattacttactcagctactttgaactcacttgctgttgcagacattcccgaaagtaacgatattacatatcattacggaaatcatcaagatcatgggaatactccaaaaccaactaaacctaataatggtcaaattacagtaactaagacatgggacagtcaacctgctcctgagggggtgaaagcgactgttcaacttgtaaatgccaagactggtgagaaagtcggtgctcctgtagaactttcagaaaataattggacatatacttggagtggtctagataattctattgaatacaaagttgaagaagaatataatggatactcagctgaatacacagtagagagcaaagggaagttgggggtaaaaaactggaaagataataacccagctccaatcaatcctgaagaaccacgtgtaaaaacatacggtaaaaagtttgtcaaagtagaccaaaaagatactcgtctagaaaatgcgcagttcgttgttaaaaaagcagatagcaataaatatattgcctttaagtcaactgcacaacaagctgcagatgaaaaagcagcagcaactgcaaaacaaaaattggatgcagcggtagcagcttacacaaatgctgcagataagcaagccgctcaagctctagtagatcaagcacagcaagaatacaatgtagcttacaaagaagccaaatttggttatgttgaagtagctggaaaagatgaagcaatggttcttacttctaatacggatggtcaattccaaatttcaggtcttgctgctggtacttataaattagaagaaattaaagctccagaaggttttgcgaaaattgatgatgtagaatttgttgttggagcaggttcttggaatcaaggtgagtttaattacttaaaagatgttcaaaagaatgacgctacaaaagtagtcaacaaaaaaatcactatcccacaaacgggtggtattggtacaattatctttgctgtagcgggggctgcgattatgggtattgcagtgtacgcatatgttaaaaacaacaaagatgaggatcaacttgcttaagtaagagagaaaggagccattgatgacaatgcagaaaatgcagaaaatgattagtcgtatcttctttgttatggctctgtgtttttctcttgtatggggtgcacatgcagtccaagcgcaagaagatcacacgttggtcttgcaattggagaactatcaggaggtggttagtcaattgccatctcgtgatggtcatcggttgcaagtatggaagttggatgattcgtattcctatgatgatcgggtgcaaattgtaagagacttgcattcgtgggatgagaataaactttcttctttcaaaaagacttcgtttgagatgaccttccttgagaatcagattgaagtatctcatattccaaatggtctttactatgttcgctctattatccagacggatgcggtttcttatccagctgaatttctttttgaaatgacagatcaaacggtagagcctttggtcattgtagcgaaaaaaacagatacaatgacaacaaaggtgaagctgataaaggtggatcaagaccacaatcgcttggagggtgtcggctttaaattggtatcagtagcaagagatggttctgaaaaagaggttcccttgattggagaataccgttacagttcttctggtcaagtagggagaactctctatactgataaaaatggagagatttttgtgacaaatcttcctcttgggaactatcgtttcaaggaggtggagccactggcaggctatgctgttacgacgctggatacggatgtccagctggtagatcatcagctggtgacgattacggttgtcaatcagaaattaccacgtggcaatgttgactttatgaaggtggatggtcggaccaatacctctcttcaaggggcaatgttcaaagtcatgaaagaagaaagcggacactatactcctgttcttcaaaatggtaaggaagtagttgtaacatcagggaaagatggtcgtttccgagtggaaggtctagagtatgggacatactatttatgggagctccaagctccaactggttatgttcaattaacatcgcctgtttcctttacaatcgggaaagatactcgtaaggaactggtaacagtggttaaaaataacaagcgaccacggattgatgtgccagatacaggggaagaaaccttgtatatcttgatgcttgttgccattttgttgtttggtagtggttattatcttacgaaaaaaccaaataactgatattcaatgtacatcattatgaaaaagatagcaggctgaagggaagaccagagtactctgaggtgatgttaatcaggaatcatggtgatgtggcatgaatcacaataacggatatgaggctgggcagattgtgccagcctcattgtgggttattgtttgtaaaacgataggactggtctggtaatcattttaggaatggacaggactgggattctgatttaaaatggatggtgaatcagaaagaaatgagattttctcgtttctcttagcagataggattgtctgttaggaaaagcgataaaatgatgagtttgaagataaagggatgctgataaaaatggtaaaaacaaaaaagcaaaaacgaaataatctcctattaggagtggtatttttcattggaatggcggtaatggcgtatccgctggtgtctcgcttgtattatcgagtggaatcaaatcaacaaattgctgactttgataaggaaaaagcaacgttggatgaggctgacattgatgaacgaatgaaattggcacaagccttcaatgactctttgaataatgtagtgagtggcgatccttggtcggaagaaatgaagaaaaaagggcgagcagagtatgcacgtatgttagaaatccatgagcggatggggcatgtggaaatccccgttattgacgtggatttgccggtttatgctggtactgctgaagaggtattgcagcaaggggctgggcatctagagggaacttctctgccgatcggaggcaattcgacccatgcggtgattacggcacatacaggtttgccaacagctaagatgtttacggatttgaccaaacttaaagttggggataagttttatgtgcacaatatcaaggaagtgatggcctatcaagtggatcaagtaaaggtgattgagccgacgaactttgatgatttattgattgtaccaggtcatgattatgtgaccttgctgacttgtacgccatacatgatcaatacccatcgtctattggttcgggggcatcggataccgtacgtagcagaggttgaggaagaatttattgcagcaaacaaactcagtcatctctatcgctacctgttttatgtggcagttggtttgattgtgattcttttatggattattcgacgcttgcgcaagaagaaaaaacaaccggaaaaggctttgaaggcgctgaaagcagcaaggaaggaagtgaaggtggaggatggacaacagtagacgttcacgaaaaaaaggcacaaaaaagaagaaacatccgctgatccttcttctgattttcttagtaggattcgccgttgcgatatatccattggtgtctcgttattattatcgtattgagtcaaacgaggttattaaagagtttgatgagacggtttcccagatggataaggcagaacttgaggagcgttggcgcttggctcaagccttcaatgcgaccttgaaaccatctgaaattcttgatccttttacagagcaagagaaaaagaaaggcgtctcagaatatgccaatatgctaaaggtccatgagcggattggctatgtggaaattcctgcgattgatcaggaaattccgatgtatgtcggaacgagtgaggaaattcttcagaagggcgcaggattgctagagggagcttcgttaccggttggtggtgaaaatacccacacagttgtcactgctcatagaggattaccgacggcagaactgtttagtcaattggataagatgaaaaaaggggatgtcttttatcttcacgttttagaccaggtgttggcctaccaagtggatcagattttgacggttgagccaaatgactttgagcctgtcttgattcaacatggggaagattatgcgaccttgttgacctgtacaccgtatatgattaacagtcatcgtctgttggtacgtgggaagcggattccgtatacggcaccaattgcagagcgaaatcgagcggtgagagagcgtgggcaattctggttgtggttattgctagcggcgttggttatgattctggtattgagttacggggtgtatcgtcatcgtcgcattgtcaaagggctagaaaaacaattggaggagcatcatgtcaaaggctaagctacagaaattactagggtatttgctgatgctggtagcattggtgattcctgtttattgttttgggcagatggtgttacagtctttaggacaagtaaaaggtcatgagatattttcagaatctgtgacggccgacagttaccaagagcaattgcaacggtcgcttgattacaatcaacgcttggattcgcaaaatcgtattgtagatccttttttggcggaagggtatgaggtaaattaccaagtgtctgacgatcctgatgcagtctacggctatttgtcgattccgagtttggaaatcatggagccagtttatctaggagcggattaccatcatttagcaatggggttggcccatgtggatgggacgcctcttcctgttgagggaaaagggattcgttcagtgattgctgggcaccgtgcagaaccaagccatgtctttttccgccatttggatcagctaaaagttggagatgctctttattatgataatggccaggaaattgtagaatatcagatgatggacacagagattattttaccgtcggaatgggaaaaattagaatcggttagctctaaaaatatcatgaccttgataacctgcgatccgattcctacctttaataaacgcttattagtgaattttgaacgagtcgctgtttatcaaaaatcagatccacaaacagctgcagttgcgagggttgcttttacgaaagaaggacaatctgtatcgcgtgttgcaacctctcaatggttgtaccgtgggctagtggtactggcatttctgggaatcctgtttgttttgtggaagctagcacgtttactacgagggaaataaaaagaaatgaaaggaaagctaaggctgttcctttttccggctctttgtcaactgtag

SEQ ID NO: 498 - DNA, 11345 bp, S. pneumoniae
gcgcttttcattataagtcttatgggacttttttgatactcaaaaagccctataatctccacagtgggatttacccactacagaaattatagagccagaaaaaacacttttgttcactagcagaaactagagagcagaagtgtttttctgttcagatttacccaaaactgggaaatatggggataagaatagagatggcttaggaagcccctttttgtgtgtagacagtacgatgaacttataacaaatagtgagcctttttagcaatcattgcgacccgtttgtcaaaagcctcttttcggatatctacaattgtctgatagatgagacgctgttggctaacatgcaaatctaaggcaatcgtcaaaaagtgatgtttccctttgggatactgctttttaacgtaaggcaggtattctttcgttgtaataataatcaatggctctgtcaaatgctcctctgaaggaggaggactaattagaatattgtatcctgtaacagaggcaactttgtcagtaaaattccgtaaaataatggactttattaagtttacatctgcttgattatttaaaatgataaaaatcgggatagcaggtagtgaggaaaagatggtttctgtcaagtagagtgagaaaaggtacagccgatgctggtcgataactccttcaatcttctgctcagtcatccactcttgaacaattgctttcgaaatatgatacagtggcttgtcgctttcaatcccataatgttcgtaataattataatagggaactagattttgtaaaccaaacaaaaacgttcttgttaagaaagtcagtgctgttaaaaaagaaagagaattcgaaatgtcatttcctaagatattcttgaacttggatagtagatgctttcctcttgtatgctgaagaatcagttgaatagtatgagtctttttttcttgattccatttgtccttggaaaacgaagaattagcagaacaataaaccaaaaagatataatccagttcttcctgagtaaaagtcatgttggcatgtggctctaagtaagtttggcaatgttccatcaaaatcggatacataaagaggttttttaatttttcaaactctttggactcagggaactcaagtggaaattcccgacgtttccaagtgagtgccactagtatgctaaaatgaacatactcgtcaggtgtgatttctaacagttcatgactgagttgagaattagactgcacaatcatatgtgtgacccaatccatacttccatcattcaaatcataaatctcaataccaaaatgaaactggaggagtgcaattaaaaaacgaatgcgatattcaggaccaactacttgatttttcacaaggtccaaacctactgaacgtagtaacaagccacacttttgtcgtacgcggtagcctgttgcgatggaaatatactctttttgtgtaaattcgttaaagctttgattaccttgtagtagaaagaagcggagtatttttaaaatagttgattggttataaagctgatggaagtaataattcgtttgatgagaatggtgttcgattaattgaacttgttgcgtatctaaattaaatgtcaactcttcctcgaatgtttcttgtaattcctgcaaaatgcttaggagacttttagattgtaatgaagttaaagtagacagttcatctagttcaatagaccgaatatccaataatatatttaaaatggtaattttatctgtaattcttttttcaatgtatttgtttagcatagttaccgaatcttagttgcatatagataattttaattattataatacaaaagaaactaattgtcttgtcaaaaaggttgtggaatttccgactttattgataaaacagcatgtaataaaaggcattttaaagatagtaatgagtattggtggagttttatggcttattttttttattagaaaatatttttttatcaaatattgtcgttctataaaaaaatatgtgataaaaatatctattgtgatggaagttgttttaatttatactaggatagttaatagtaatactatactatactatattgtatacaagtgtgtcattgccaggttgagaagatagctataacgcacttttatacgcttttgctacgtttgttagtgaacggattaactcagtgagataaattttatcagaacataagtaatccgtttcttcgtgtatacagattgaaagtacctatgaatcatagaaggattaacttgttctatgaataatgcttaacagggagacacacatgaaaaaagtaagaaagatatttcagaaggcagttgcaggactgtgctgtatatctcagttgacagctttttcttcgatagttgctttagcagaaacgcctgaaaccagtccagcgataggaaaagtagtgattaaggagacaggcgaaggaggagcgcttctaggagatgccgtctttgagttgaaaaacaatacggatggcacaactgtttcgcaaaggacagaggcgcaaacaggagaagcgatattttcaaacataaaacctgggacatacaccttgacagaagcccaacctccagttggttataaaccctctactaaacaatggactgttgaagttgagaagaatggtcggacgactgtccaaggtgaacaggtagaaaatcgagaagaggctctatctgaccagtatccacaaacagggacttatccagatgttcaaacaccttatcagattattaaggtagatggttcggaaaaaaacggacagcacaaggcgttgaatccgaatccatatgaacgtgtgattccagaaggtacactttcaaagagaatttatcaagtgaataatttggatgataaccaatatggaatcgagttgacggttagtggtaaaacgacggttgaaacgaaagaagcctctactccgctagatgttgttattctattagataactccaatagtatgagtaatattcgacataatcatgcccatcgagcggaaaaagcgggagaagcgacacgagcccttgtagataagattacctccaatccagataatcgagtagcacttgtgacttatggctcaactatctttgacggttcagaagctactgtggaaaaaggggtagcagatgcgaacggaaaaatattgaatgactcagctttatggacgttcgatcgtacgacgtttacagctaaaacttataattatagctttttaaatctcacatcagatcctactgatattcaaactattaaggataggattccatcagatgcagaggaattgaacaaagacaaattgatgtatcaattcggcgcgacttttacccagaaggctttgatgaccgctgatgatatcttgacaaagcaggcaagaccaaacagtaaaaaggttattttccacattacagatggtgttccgactatgtcatatccaattaattttaaatatacaggaacgacgcaatcgtacagaactcagctgaataattttaaagcaaaaactccaaatagtagcgggatattactggaggactttgttacatggtcagcagatggtgaacataagattgttcgtggagatggtgaaagttatcagatgtttacgaagaaacctgtaacagaccaatacggagttcatcaaatactttcaatcacctccatggagcagagagctaaattagtttcagcgggatataggttctatggaactgacttgtatttatattggcgtgatagtattctagcctatccatttaactctagtaccgattggattaccaaccatggtgaccctacgacttggtattataacggaaatatggctcaggatggctatgatgtcttcactgttggggttggtgtaaacggggatcctggtacggatgaagcaacggctactagatttatgcagagcatctctagttctcctgacaactacactaacgtagcagatccatctcagattttacaagaattgaatcgctacttctatactatcgtcaatgagaagaaatctatcgaaaatggtacgattacagacccgatgggtgaactaattgatttccaattgggagcagatggaaggtttgatccagcggattacactttaactgcaaacgatggtagttcgttggtgaataatgtccctactgggggaccacaaaatgatggtggcttgctaaaaaatgcaaaagtgttctatgatacgactgagaaaaggattcgtgtaacaggtttgtaccttggaacgggtgaaaaagttacattgacttataatgttcgcttgaatgaccaatttgtaagcaataaattctatgacacgaatggtcgaacaaccctacaccctaaggaagtagaaaagaacacagtgcgcgacttcccgattcctaagattcgtgatgtacgaaagtatccagaaatcacaattccaaaagagaaaaaacttggtgaaattgagtttattaagatcaataagaatgataaaaaaccactgagagatgcggtctttagtcttcaaaaacaacatccggattatccagatatttatggagctattgatcaaaatggcacttatcaaaatgtgagaacaggtgaagatggtaagttgacctttaaaaatctgtcagatgggaaatatcgattatttgaaaattctgaaccagctggttataaacccgttcaaaataagcctatcgttgccttccaaatagtaaatggagaagtcagagatgtgacttcaatcgttccacaagatataccagcgggttacgagtttacgaatgataagcactatatcacaaatgagccaattcctccaaaaagagaatatcctcgaactggtggtatcggaatgttgccattctatctgataggttgcatgatgatgggaggagttctattatacacacggaaacatccgtaaagtgtagcaatgagaaatgataatatcgatactctgagcgatacttttaagaagtagcactcaagaagagatttaagtttacttggtgaaaacagttttcttcgccaagtaaaccaccattgaaaggggagatgttttcgaaaacttgcacagaaaaaaggattattattgtcatgtgtaattcattacattgctcacagttgattttaagagatatgaataaggagaaatcatgaaatcaatcaacaaatttttaacaatgcttgctgccttattactgacagcgagtagcctgttttcagctgcaacagtttttgcggcggacaatgttagtacagcaccagatgctgttactaaaactttaacaatccataagttactgctctcagaagatgatttaaagacttgggatacaaacggtcctaaaggatatgatggaactcaatctagtttaaaagatttaactggagttgtagctgaggaaattccaaatgtatactttgaattacaaaagtataatttgactgatggtaaggaaaaagaaaatcttaaagatgatagtaaatggacaacagttcatggtggtttgacaactaaagatggacttaaaattgaaaccagtactcttaaaggtgtgtatcgtattcgtgaggatagaacaaagactacctatgttggtcctaatgggcaagtattaacaggttcaaaagccgtacctgctcttgtaactcttccacttgttaacaataatggtacagtaattgatgcacatgttttccctaaaaattcatataataaaccagttgtagataaaagaattgctgatactttgaattataacgatcaaaatggtctgtctatcggtactaaaatcccatatgttgttaatacaacaattccaagtaatgcaacatttgcaacttcattttggtcagatgaaatgacagaaggtctaacttataatgaagatgtaacaattactttgaataatgtagctatggatcaagctgattatgaagtcactaaaggaaataatggctttaacttaaaattaacagaagcaggtttagctaaaattaatggtaaggatgcagaccaaaaaatccaaattacttactcagctactttgaactcacttgctgttgcagacattcctgaaagtaacgatattacatatcattacggaaatcatcaagatcatgggaatactccaaaaccaactaaacctaataatggtcaaattacagtaactaagacatgggacagtcaacctgctcctgagggggtgaaagcgactgttcaacttgtaaatgccaagactggtgagaaagtcggtgctcctgtagaactttcagaaaataattggacatatacttggagtggtctagataattctattgaatacaaagttgaagaagaatataatggatactcagctgaatacacagtagagagcaaagggaagttgggggtaaaaaactggaaagataataacccagctccaatcaatcctgaagaaccacgtgtaaaaacatacggtaaaaagtttgtcaaagtagaccaaaaagatactcgtctagaaaatgcgcagttcgttgttaaaaaagcagatagcaataaatatattgcctttaagtcaactgcacaacaagctgcagatgaaaaagcagcagcaactgcaaaacaaaaattggatgcagcggtagcagcttacacaaatgctgcagataagcaagccgctcaagctctagtagatcaagcacagcaagaatacaatgtagcttacaaagaagccaaatttggttatgttgaagtagctggaaaagatgaagcaatggttcttacttctaatacggatggtcaattccaaatttcaggtcttgctgctggtacttataaattagaagaaattaaagctccagaaggttttgcgaaaattgatgatgtagaatttgttgttggagcaggttcttggaatcaaggtgagtttaattacttaaaagatgttcaaaagaatgacgctacaaaagtagtcaacaaaaaaatcactatcccacaaacgggtggtattggtacaattatctttgctgtagcgggggctgcgattatgggtattgcagtgtacgcatatgttaaaaacaacaaagatgaggatcaacttgcttaagtaagagagaaaggagccattgatgacaatgcagaaaatgcagaaaatgattagtcgtatcttctttgttatggctctgtgtttttctcttgtatggggtgcacatgcagtccaagcgcaagaagatcacacgttggtcttgcaattggagaactatcaggaggtggttagtcaattgccatctcgtgatggtcatcggttgcaagtatggaagttggatgattcgtattcctatgatgatcgggtgcaaattgtaagagacttgcattcgtgggatgagaataaactttcttctttcaaaaagacttcgtttgagatgaccttccttgagaatcagattgaagtatctcatattccaaatggtctttactatgttcgctctattatccagacggatgcggtttcttatccagctgaatttctttttgaaatgacagatcaaacggtagagcctttggtcattgtagcgaaaaaaacagatacaatgacaacaaaggtgaagctgataaaggtggatcaagaccacaatcgcttggagggtgtcggctttaaattggtatcagtagcaagagatggttctgaaaaagaggttcccttgattggagaataccgttacagttcttctggtcaagtagggagaactctctatactgataaaaatggagagatttttgtgacaaatcttcctcttgggaactatcgtttcaaggaggtggagccactggcaggctatgctgttacgacgctggatacggatgtccagctggtagatcatcagctggtgacgattacggttgtcaatcagaaattaccacgtggcaatgttgactttatgaaggtggatggtcggaccaatacctctcttcaaggggcaatgttcaaagtcatgaaagaagaaagcggacactatactcctgttcttcaaaatggtaaggaagtagttgtaacatcagggaaagatggtcgtttccgagtggaaggtctagagtatgggacatactatttatgggagctccaagctccaactggttatgttcaattaacatcgcctgtttcctttacaatcgggaaagatactcgtaaggaactggtaacagtggttaaaaataacaagcgaccacggattgatgtgccagatacaggggaagaaaccttgtatatcttgatgcttgttgccattttgttgtttggtagtggttattatcttacgaaaaaaccaaataactgatattcaatgtacatcattatgaaaaagatagcaggctgaagggaagaccagagtactctgaggtgatgttaatcaggaatcatggtgatgtggcatgaatcacaataacggatatgaggctgggcagattgtgccagcctcattgtgggttattgtttgtaaaacgataggactggtctggtaatcattttaggaatggacaggactgggattctgatttaaaatggatggtgaatcagaaagaaatgagattttctcgtttctcttagcagataggattgtctgttaggaaaagcgataaaatgatgagtttgaagataaagggatgctgataaaaatggtaaaaacaaaaaagcaaaaacgaaataatctcctattaggagtggtatttttcattggaatggcggtaatggcgtatccgctggtgtctcgcttgtattatcgagtggaatcaaatcaacaaattgctgactttgataaggaaaaagcaacgttggatgaggctgacattgatgaacgaatgaaattggcacaagccttcaatgactctttgaataatgtagtgagtggcgatccttggtcggaagaaatgaagaaaaaagggcgagcagagtatgcacgtatgttagaaatccatgagcggatggggcatgtggaaatccccgttattgacgtggatttgccggtttatgctggtactgctgaagaggtattgcagcaaggggctgggcatctagagggaacttctctgccgatcggaggcaattcgacccatgcggtgattacggcacatacaggtttgccaacagctaagatgtttacggatttgaccaaacttaaagttggggataagttttatgtgcacaatatcaaggaagtgatggcctatcaagtggatcaagtaaaggtgattgagccgacgaactttgatgatttattgattgtaccaggtcatgattatgtgaccttgctgacttgtacgccatacatgatcaatacccatcgtctattggttcgggggcatcggataccgtacgtagcagaggttgaggaagaatttattgcagcaaacaaactcagtcatctctatcgctacctgttttatgtggcagttggtttgattgtgattcttttatggattattcgacgcttgcgcaagaagaaaaaacaaccggaaaaggctttgaaggcgctgaaagcagcaaggaaggaagtgaaggtggaggatggacaacagtagacgttcacgaaaaaaaggcacaaaaaagaagaaacatccgctgatccttcttctgattttcttagtaggattcgccgttgcgatatatccattggtgtctcgttattattatcgtattgagtcaaacgaggttattaaagagtttgatgagacggtttcccagatggataaggcagaacttgaggagcgttggcgcttggctcaagccttcaatgcgaccttgaaaccatctgaaattcttgatccttttacagagcaagagaaaaagaaaggcgtctcagaatatgccaatatgctaaaggtccatgagcggattggctatgtggaaattcctgcgattgatcaggaaattccgatgtatgtcggaacgagtgaggaaattcttcagaagggcgcaggattgctagagggagcttcgttaccggttggtggtgaaaatacccacacagttgtcactgctcatagaggattaccgacggcagaactgtttagtcaattggataagatgaaaaaaggggatgtcttttatcttcacgttttagaccaggtgttggcctaccaagtggatcagattttgacggttgagccaaatgactttgagcctgtcttgattcaacatggggaagattatgcgaccttgttgacctgtacaccgtatatgattaacagtcatcgtctgttggtacgtgggaagcggattccgtatacggcaccaattgcagagcgaaatcgagcggtgagagagcgtgggcaattctggttgtggttattgctagcggcgttggttatgattctggtattgagttacggggtgtatcgtcatcgtcgcattgtcaaagggctagaaaaacaattggaggagcatcatgtcaaaggctaagctacagaaattactagggtatttgctgatgctggtagcattggtgattcctgtttattgttttgggcagatggtgttacagtctttaggacaagtaaaaggtcatgagatattttcagaatctgtgacggccgacagttaccaagagcaattgcaacggtcgcttgattacaatcaacgcttggattcgcaaaatcgtattgtagatccttttttggcggaagggtatgaggtaaattaccaagtgtctgacgatcctgatgcagtctacggctatttgtcgattccgagtttggaaatcatggagccagtttatctaggagcggattaccatcatttagcaatggggttggcccatgtggatgggacgcctcttcctgttgagggaaaagggattcgttcagtgattgctgggcaccgtgcagaaccaagccatgtctttttccgccatttggatcagctaaaagttggagatgctctttattatgataatggccaggaaattgtagaatatcagatgatggacacagagattattttaccgtcggaatgggaaaaattagaatcggttagctctaaaaatatcatgaccttgataacctgcgatccgattcctacctttaataaacgcttattagtgaattttgaacgagtcgctgtttatcaaaaatcagatccacaaacagctgcagttgcgagggttgcttttacgaaagaaggacaatctgtatcgcgtgttgcaacctctcaatggttgtaccgtgggctagtggtactggcatttctgggaatcctgtttgttttgtggaagctagcacgtttactacgagggaaataaaaagaaatgaaaggaaagctaaggctgttcctttttccggctctttgtcaactgtag

SEQ ID NO: 499 - DNA, 11351 bp, S. pneumoniae
gtttaggcgcttttcattataagtcttatgggacttttttgatactcaaaaagccctataatctccacagtgggatttacccactacagaaattatagagccagaaaaaacacttttgttcactagcagaaactagagagcagaagtgtttttctgttcagatttacccaaaactgggaaatatggggataagaatagagatggcttaggaagcccctttttgtgtgtagacagtacgatgaacttataacaaatagtgagcctttttagcaatcattgcgacccgtttgtcaaaagcctcttttcggatatctacaattgtctgatagatgagacgctgttggctaacatgcaaatctaaggcaatcgtcaaaaagtgatgtttccctttgggatactgctttttaacgtaaggcaggtattctttcgttgtaataataatcaatggctctgtcaaatgctcctctgaaggaggaggactaattagaatattgtatcctgtaacagaggcaactttgtcagtaaaattccgtaaaataatggactttattaagtttacatctgcttgattatttaaaatgataaaaatcgggatagcaggtagtgaggaaaagatggtttctgtcaagtagagtgagaaaaggtacagccgatgctggtcgataactccttcaatcttctgctcagtcatccactcttgaacaattgctttcgaaatatgatacagtggcttgtcgctttcaatcccataatgttcgtaataattataatagggaactagattttgtaaaccaaacaaaaacgttcttgttaagaaagtcagtgctgttaaaaaagaaagagaattcgaaatgtcatttcctaagatattcttgaacttggatagtagatgctttcctcttgtatgctgaagaatcagttgaatagtatgagtctttttttcttgattccatttgtccttggaaaacgaagaattagcagaacaataaaccaaaaagatataatccagttcttcctgagtaaaagtcatgttggcatgtggctctaagtaagtttggcaatgttccatcaaaatcggatacataaagaggttttttaatttttcaaactctttggactcagggaactcaagtggaaattcccgacgtttccaagtgagtgccactagtatgctaaaatgaacatactcgtcaggtgtgatttctaacagttcatgactgagttgagaattagactgcacaatcatatgtgtgacccaatccatacttccatcattcaaatcataaatctcaataccaaaatgaaactggaggagtgcaattaaaaaacgaatgcgatattcaggaccaactacttgatttttcacaaggtccaaacctactgaacgtagtaacaagccacacttttgtcgtacgcggtagcctgttgcgatggaaatatactctttttgtgtaaattcgttaaagctttgattaccttgtagtagaaagaagcggagtatttttaaaatagttgattggttataaagctgatggaagtaataattcgtttgatgagaatggtgttcgattaattgaacttgttgcgtatctaaattaaatgtcaactcttcctcgaatgtttcttgtaattcctgcaaaatgcttaggagacttttagattgtaatgaagttaaagtagacagttcatctagttcaatagaccgaatatccaataatatatttaaaatggtaattttatctgtaattcttttttcaatgtatttgtttagcatagttaccgaatcttagttgcatatagataattttaattattataatacaaaagaaactaattgtcttgtcaaaaaggttgtggaatttccgactttattgataaaacagcatgtaataaaaggcattttaaagatagtaatgagtattggtggagttttatggcttattttttttattagaaaatatttttttatcaaatattgtcgttctataaaaaaatatgtgataaaaatatctattgtgatggaagttgttttaatttatactaggatagttaatagtaatactatactatactatattgtatacaagtgtgtcattgccaggttgagaagatagctataacgcacttttatacgcttttgctacgtttgttagtgaacggattaactcagcatgagataaattttatcagaataagtaatccgtttcttcgtgtatacagattgaaagtacctatgaatcatagaaggattaacttgttctatgaataatgcttaacagggagacacacatgaaaaaagtaagaaagatatttcagaaggcagttgcaggactgtgctgtatatctcagttgacagctttttcttcgatagttgctttagcagaaacgcctgaaaccagtccagcgataggaaaagtagtgattaaggagacaggcgaaggaggagcgcttctaggagatgccgtctttgagttgaaaaacaatacggatggcacaactgtttcgcaaaggacagaggcgcaaacaggagaagcgatattttcaaacataaaacctgggacatacaccttgacagaagcccaacctccagttggttataaaccctctactaaacaatggactgttgaagttgagaagaatggtcggacgactgtccaaggtgaacaggtagaaaatcgagaagaggctctatctgaccagtatccacaaacagggacttatccagatgttcaaacaccttatcagattattaaggtagatggttcggaaaaaaacggacagcacaaggcgttgaatccgaatccatatgaacgtgtgattccagaaggtacactttcaaagagaatttatcaagtgaataatttggatgataaccaatatggaatcgagttgacggttagtggtaaaacgacggttgaaacgaaagaagcctctactccgctagatgttgttattctattagataactccaatagtatgagtaatattcgacataatcatgcccatcgagcggaaaaagcgggagaagcgacacgagcccttgtagataagattacctccaatccagataatcgagtagcacttgtgacttatggctcaactatctttgacggttcagaagctactgtggaaaaaggggtagcagatgcgaacggaaaaatattgaatgactcagctttatggacgttcgatcgtacgacgtttacagctaaaacttataattatagctttttaaatctcacatcagatcctactgatattcaaactattaaggataggattccatcagatgcagaggaattgaacaaagacaaattgatgtatcaattcggcgcgacttttacccagaaggctttgatgaccgctgatgatatcttgacaaagcaggcaagaccaaacagtaaaaaggttattttccacattacagatggtgttccgactatgtcatatccaattaattttaaatatacaggaacgacgcaatcgtacagaactcagctgaataattttaaagcaaaaactccaaatagtagcgggatattactggaggactttgttacatggtcagcagatggtgaacataagattgttcgtggagatggtgaaagttatcagatgtttacgaagaaacctgtaacagaccaatacggagttcatcaaatactttcaatcacctccatggagcagagagctaaattagtttcagcgggatataggttctatggaactgacttgtatttatattggcgtgatagtattctagcctatccatttaactctagtaccgattggattaccaaccatggtgaccctacgacttggtattataacggaaatatggctcaggatggctatgatgtcttcactgttggggttggtgtaaacggggatcctggtacggatgaagcaacggctactagatttatgcagagcatctctagttctcctgacaactacactaacgtagcagatccatctcagattttacaagaattgaatcgctacttctatactatcgtcaatgagaagaaatctatcgaaaatggtacgattacagacccgatgggtgaactaattgatttccaattgggagcagatggaaggtttgatccagcggattacactttaactgcaaacgatggtagttcgttggtgaataatgtccctactgggggaccacaaaatgatggtggcttgctaaaaaatgcaaaagtgttctatgatacgactgagaaaaggattcgtgtaacaggtttgtaccttggaacgggtgaaaaagttacattgacttataatgttcgcttgaatgaccaatttgtaagcaataaattctatgacacgaatggtcgaacaaccctacaccctaaggaagtagaaaagaacacagtgcgcgacttcccgattcctaagattcgtgatgtacgaaagtatccagaaatcacaattccaaaagagaaaaaacttggtgaaattgagtttattaagatcaataagaatgataaaaaaccactgagagatgcggtctttagtcttcaaaaacaacatccggattatccagatatttatggagctattgatcaaaatggcacttatcaaaatgtgagaacaggtgaagatggtaagttgacctttaaaaatctgtcagatgggaaatatcgattatttgaaaattctgaaccagctggttataaacccgttcaaaataagcctatcgttgccttccaaatagtaaatggagaagtcagagatgtgacttcaatcgttccacaagatataccagcgggttacgagtttacgaatgataagcactatatcacaaatgagccaattcctccaaaaagagaatatcctcgaactggtggtatcggaatgttgccattctatctgataggttgcatgatgatgggaggagttctattatacacacggaaaaatccgtaaagtgtagcaatgagaaatgataatatcgatactctgagcgatacttttaagaagtagcactcaagaagagatttaagtttacttggtgaaaacagttttcttcgccaagtaaaccaccattgaaaggggagatgttttcgaaaacttgcacagaaaaaaggattattattgtcatgtgtaattcattacattgctcacagttgattttaagagatatgaataaggagaaatcatgaaatcaatcaacaaatttttaacaatgcttgctgccttattactgacagcgagtagcctgttttcagctgcaacagtttttgcggcggacaatgttagtacagcaccagatgctgttactaaaactttaacaatccataagttactgctctcagaagatgatttaaagacttgggatacaaacggtcctaaaggatatgatggaactcaatctagtttaaaagatttaactggagttgtagctgaggaaattccaaatgtatactttgaattacaaaagtataatttgactgatggtaaggaaaaagaaaatcttaaagatgatagtaaatggacaacagttcatggtggtttgacaactaaagatggacttaaaattgaaaccagtactcttaaaggtgtgtatcgtattcgtgaggatagaacaaagactacctatgttggtcctaatgggcaagtattaacaggttcaaaagccgtacctgctcttgtaactcttccacttgttaacaataatggtacagtaattgatgcacatgttttccctaaaaattcatataataaaccagttgtagataaaagaattgctgatactttgaattataacgatcaaaatggtctgtctatcggtactaaaatcccatatgttgttaatacaacaattccaagtaatgcaacatttgcaacttcattttggtcagatgaaatgacagaaggtctaacttataatgaagatgtaacaattactttgaataatgtagctatggatcaagctgattatgaagtcactaaaggaattaatggctttaacttaaaattaacagaagcaggtttagctaaaattaatggtaaggatgcagaccaaaaaatccaaattacttactcagctactttgaactcacttgctgttgcagacattcctgaaagtaacgatattacatatcattacggaaatcatcaagatcatgggaatactccaaaaccaactaaacctaataatggtcaaattacagtaactaagacatgggacagtcaacctgctcctgagggggtgaaagcgactgttcaacttgtaaatgccaagactggtgagaaagtcggtgctcctgtagaactttcagaaaataattggacatatacttggagtggtctagataattctattgaatacaaagttgaagaagaatataatggatactcagctgaatacacagtagagagcaaagggaagttgggggtaaaaaactggaaagataataacccagctccaatcaatcctgaagaaccacgtgtaaaaacatacggtaaaaagtttgtcaaagtagaccaaaaagatactcgtctagaaaatgcgcagttcgttgttaaaaaagcagatagcaataaatatattgcctttaagtcaactgcacaacaagctgcagatgaaaaagcagcagcaactgcaaaacaaaaattggatgcagcggtagcagcttacacaaatgctgcagataagcaagccgctcaagctctagtagatcaagcacagcaagaatacaatgtagcttacaaagaagccaaatttggttatgttgaagtagctggaaaagatgaagcaatggttcttacttctaatacggatggtcaattccaaatttcaggtcttgctgctggtacttataaattagaagaaattaaagctccagaaggttttgcgaaaattgatgatgtagaatttgttgttggagcaggttcttggaatcaaggtgagtttaattacttaaaagatgttcaaaagaatgacgctacaaaagtagtcaacaaaaaaatcactatcccacaaacgggtggtattggtacaattatctttgctgtagcgggggctgcgattatgggtattgcagtgtacgcatatgttaaaaacaacaaagatgaggatcaacttgcttaagtaagagagaaaggagccattgatgacaatgcagaaaatgcagaaaatgattagtcgtatcttctttgttatggctctgtgtttttctcttgtatggggtgcacatgcagtccaagcgcaagaagatcacacgttggtcttgcaattggagaactatcaggaggtggttagtcaattgccatctcgtgatggtcatcggttgcaagtatggaagttggatgattcgtattcctatgatgatcgggtgcaaattgtaagagacttgcattcgtgggatgagaataaactttcttctttcaaaaagacttcgtttgagatgaccttccttgagaatcagattgaagtatctcatattccaaatggtctttactatgttcgctctattatccagacggatgcggtttcttatccagctgaatttctttttgaaatgacagatcaaacggtagagcctttggtcattgtagcgaaaaaaacagatacaatgacaacaaaggtgaagctgataaaggtggatcaagaccacaatcgcttggagggtgtcggctttaaattggtatcagtagcaagagatggttctgaaaaagaggttcccttgattggagaataccgttacagttcttctggtcaagtagggagaactctctatactgataaaaatggagagatttttgtgacaaatcttcctcttgggaactatcgtttcaaggaggtggagccactggcaggctatgctgttacgacgctggatacggatgtccagctggtagatcatcagctggtgacgattacggttgtcaatcagaaattaccacgtggcaatgttgactttatgaaggtggatggtcggaccaatacctctcttcaaggggcaatgttcaaagtcatgaaagaagaaagcggacactatactcctgttcttcaaaatggtaaggaagtagttgtaacatcagggaaagatggtcgtttccgagtggaaggtctagagtatgggacatactatttatgggagctccaagctccaactggttatgttcaattaacatcgcctgtttcctttacaatcgggaaagatactcgtaaggaactggtaacagtggttaaaaataacaagcgaccacggattgatgtgccagatacaggggaagaaaccttgtatatcttgatgcttgttgccattttgttgtttggtagtggttattatcttacgaaaaaaccaaataactgatattcaatgtacatcattatgaaaaagatagcaggctgaagggaagaccagagtactctgaggtgatgttaatcaggaatcatggtgatgtggcatgaatcacaataacggatatgaggctgggcagattgtgccagcctcattgtgggttattgtttgtaaaacgataggactggtctggtaatcattttaggaatggacaggactgggattctgatttaaaatggatggtgaatcagaaagaaatgagattttctcgtttctcttagcagataggattgtctgttaggaaaagcgataaaatgatgagtttgaagataaagggatgctgataaaaatggtaaaaacaaaaaagcaaaaacgaaataatctcctattaggagtggtatttttcattggaatggcggtaatggcgtatccgctggtgtctcgcttgtattatcgagtggaatcaaatcaacaaattgctgactttgataaggaaaaagcaacgttggatgaggctgacattgatgaacgaatgaaattggcacaagccttcaatgactctttgaataatgtagtgagtggcgatccttggtcggaagaaatgaagaaaaaagggcgagcagagtatgcacgtatgttagaaatccatgagcggatggggcatgtggaaatccccgttattgacgtggatttgccggtttatgctggtactgctgaagaggtattgcagcaaggggctgggcatctagagggaacttctctgccgatcggaggcaattcgacccatgcggtgattacggcacatacaggtttgccaacagcgaagatgtttacggatttgaccaaacttaaagttggggataagttttatgtgcacaatatcaaggaagtgatggcctatcaagtggatcaagtaaaggtgattgagccgacgaactttgatgatttattgattgtaccaggtcatgattatgtgaccttgctgacttgtacgccatacatgatcaatacccatcgtctattggttcgggggcatcggataccgtacgtagcagaggttgaggaagaatttattgcagcaaacaaactcagtcatctctatcgctacctgttttatgtggcagttggtttgattgtgattcttttatggattattcgacgcttgcgcaagaagaaaaaacaaccggaaaaggctttgaaggcgctgaaagcagcaaggaaggaagtgaaggtggaggatggacaacagtagacgttcacgaaaaaaaggcacaaaaaagaagaaacatccgctgatccttcttctgattttcttagtaggattcgccgttgcgatatatccattggtgtctcgttattattatcgtattgagtcaaacgaggttattaaagagtttgatgagacggtttcccagatggataaggcagaacttgaggagcgttggcgcttggctcaagccttcaatgcgaccttgaaaccatctgaaattcttgatccttttacagagcaagagaaaaagaaaggcgtctcagaatatgccaatatgctaaaggtccatgagcggattggctatgtggaaattcctgcgattgatcaggaaattccgatgtatgtcggaacgagtgaggaaattcttcagaagggcgcaggattgctagagggagcttcgttaccggttggtggtgaaaatacccacacagttgtcactgctcatagaggattaccgacggcagaactgtttagtcaattggataagatgaaaaaaggggatgtcttttatcttcacgttttagaccaggtgttggcctaccaagtggatcagattttgacggttgagccaaatgactttgagcctgtcttgattcaacatggggaagattatgcgaccttgttgacctgtacaccgtatatgattaacagtcatcgtctgttggtacgtgggaagcggattccgtatacggcaccaattgcagagcgaaatcgagcggtgagagagcgtgggcaattctggttgtggttattgctagcggcgttggttatgattctggtattgagttacggggtgtatcgtcatcgtcgcattgtcaaagggctagaaaaacaattggaggagcatcatgtcaaaggctaagctacagaaattactagggtatttgctgatgctggtagcattggtgattcctgtttattgttttgggcagatggtgttacagtctttaggacaagtaaaaggtcatgagatattttcagaatctgtgacggccgacagttaccaagagcaattgcaacggtcgcttgattacaatcaacgcttggattcgcaaaatcgtattgtagatccttttttggcggaagggtatgaggtaaattaccaagtgtctgacgatcctgatgcagtctacggctatttgtcgattccgagtttggaaatcatggagccagtttatctaggagcggattaccatcatttagcaatggggttggcccatgtggatgggacgcctcttcctgttgagggaaaagggattcgttcagtgattgctgggcaccgtgcagaaccaagccatgtctttttccgccatttggatcagctaaaagttggagatgctctttattatgataatggccaggaaattgtagaatatcagatgatggacacagagattattttaccgtcggaatgggaaaaattagaatcggttagctctaaaaatatcatgaccttgataacctgcgatccgattcctacctttaataaacgcttattagtgaattttgaacgagtcgctgtttatcaaaaatcagatccacaaacagctgcagttgcgagggttgcttttacgaaagaaggacaatctgtatcgcgtgttgcaacctctcaatggttgtaccgtgggctagtggtactggcatttatgggaatcctgtttgttttgtggaagctagcacgtttactacgagggaaataaaaagaaatgaaaggaaagctaaggctgttcctttttccggctctttgtcaactgtag

SEQ ID NO: 500 - DNA, 11349 bp, S. pneumoniae
tttaggcgcttttcattataagtcttatgggacttttttgatactcaaaaagccctataatctccacagtgggatttacccactacagaaattatagagccagaaaaaacacttttgttcactagcagaaactagagagcagaagtgtttttctgttcagatttacccaaaactgggaaatatggggataagaatagagatggcttaggaagcccctttttgtgtgtagacagtacgatgaacttataacaaatagtgagcctttttagcaatcattgcgacccgtttgtcaaaagcctcttttcggatatctacaattgtctgatagatgagacgctgttggctaacatgcaaatctaaggcaatcgtcaaaaagtgatgtttccctttgggatactgctttttaacgtaaggcaggtattctttcgttgtaataataatcaatggctctgtcaaatgctcctctgaaggaggaggactaattagaatattgtatcctgtaacagaggcaactttgtcagtaaaattccgtaaaataatggactttattaagtttacatctgcttgattatttaaaatgataaaaatcgggatagcaggtagtgaggaaaagatggtttctgtcaagtagagtgagaaaaggtacagccgatgctggtcgataactccttcaatcttctgctcagtcatccactcttgaacaattgctttcgaaatatgatacagtggcttgtcgctttcaatcccataatgttcgtaataattataatagggaactagattttgtaaaccaaacaaaaacgttcttgttaagaaagtcagtgctgttaaaaaagaaagagaattcgaaatgtcatttcctaagatattcttgaacttggatagtagatgctttcctcttgtatgctgaagaatcagttgaatagtatgagtctttttttcttgattccatttgtccttggaaaacgaagaattagcagaacaataaaccaaaaagatataatccagttcttcctgagtaaaagtcatgttggcatgtggctctaagtaagtttggcaatgttccatcaaaatcggatacataaagaggttttttaatttttcaaactctttggactcagggaactcaagtggaaattcccgacgtttccaagtgagtgccactagtatgctaaaatgaacatactcgtcaggtgtgatttctaacagttcatgactgagttgagaattagactgcacaatcatatgtgtgacccaatccatacttccatcattcaaatcataaatctcaataccaaaatgaaactggaggagtgcaattaaaaaacgaatgcgatattcaggaccaactacttgatttttcacaaggtccaaacctactgaacgtagtaacaagccacacttttgtcgtacgcggtagcctgttgcgatggaaatatactctttttgtgtaaattcgttaaagctttgattaccttgtagtagaaagaagcggagtatttttaaaatagttgattggttataaagctgatggaagtaataattcgtttgatgagaatggtgttcgattaattgaacttgttgcgtatctaaattaaatgtcaactcttcctcgaatgtttcttgtaattcctgcaaaatgcttaggagacttttagattgtaatgaagttaaagtagacagttcatctagttcaatagaccgaatatccaataatatatttaaaatggtaattttatctgtaattcttttttcaatgtatttgtttagcatagttaccgaatcttagttgcatatagataattttaattattataatacaaaagaaactaattgtcttgtcaaaaaggttgtggaatttccgactttattgataaaacagcatgtaataaaaggcattttaaagatagtaatgagtattggtggagttttatggcttattttttttattagaaaatatttttttatcaaatattgtcgttctataaaaaaatatgtgataaaaatatctattgtgatggaagttgttttaatttatactaggatagttaatagtaatactatactatactatattgtatacaagtgtgtcattgccaggttgagaagatagctataacgcacttttatacgcttttgctacgtttgttagtgaacggattaactcagcatgagataaattttatcagaataagtaatccgtttcttcgtgtatacagattgaaagtacctatgaatcatagaaggattaacttgttctatgaataatgcttaacagggagacacacatgaaaaaagtaagaaagatatttcagaaggcagttgcaggactgtgctgtatatctcagttgacagctttttcttcgatagttgctttagcagaaacgcctgaaaccagtccagcgataggaaaagtagtgattaaggagacaggcgaaggaggagcgcttctaggagatgccgtctttgagttgaaaaacaatacggatggcacaactgtttcgcaaaggacagaggcgcaaacaggagaagcgatattttcaaacataaaacctgggacatacaccttgacagaagcccaacctccagttggttataaaccctctactaaacaatggactgttgaagttgagaagaatggtcggacgactgtccaaggtgaacaggtagaaaatcgagaagaggctctatctgaccagtatccacaaacagggacttatccagatgttcaaacaccttatcagattattaaggtagatggttcggaaaaaaacggacagcacaaggcgttgaatccgaatccatatgaacgtgtgattccagaaggtacactttcaaagagaatttatcaagtgaataatttggatgataaccaatatggaatcgagttgacggttagtggtaaaacgacggttgaaacgaaagaagcctctactccgctagatgttgttattctattagataactccaatagtatgagtaatattcgacataatcatgcccatcgagcggaaaaagcgggagaagcgacacgagcccttgtagataagattacctccaatccagataatcgagtagcacttgtgacttatggctcaactatctttgacggttcagaagctactgtggaaaaaggggtagcagatgcgaacggaaaaatattgaatgactcagctttatggacgttcgatcgtacgacgtttacagctaaaacttataattatagctttttaaatctcacatcagatcctactgatattcaaactattaaggataggattccatcagatgcagaggaattgaacaaagacaaattgatgtatcaattcggcgcgacttttacccagaaggctttgatgaccgctgatgatatcttgacaaagcaggcaagaccaaacagtaaaaaggttattttccacattacagatggtgttccgactatgtcatatccaattaattttaaatatacaggaacgacgcaatcgtacagaactcagctgaataattttaaagcaaaaactccaaatagtagcgggatattactggaggactttgttacatggtcagcagatggtgaacataagattgttcgtggagatggtgaaagttatcagatgtttacgaagaaacctgtaacagaccaatacggagttcatcaaatactttcaatcacctccatggagcagagagctaaattagtttcagcgggatataggttctatggaactgacttgtatttatattggcgtgatagtattctagcctatccatttaactctagtaccgattggattaccaaccatggtgaccctacgacttggtattataacggaaatatggctcaggatggctatgatgtcttcactgttggggttggtgtaaacggggatcctggtacggatgaagcaacggctactagatttatgcagagcatctctagttctcctgacaactacactaacgtagcagatccatctcagattttacaagaattgaatcgctacttctatactatcgtcaatgagaagaaatctatcgaaaatggtacgattacagacccgatgggtgaactaattgatttccaattgggagcagatggaaggtttgatccagcggattacactttaactgcaaacgatggtagttcgttggtgaataatgtccctactgggggaccacaaaatgatggtggcttgctaaaaaatgcaaaagtgttctatgatacgactgagaaaaggattcgtgtaacaggtttgtaccttggaacgggtgaaaaagttacattgacttataatgttcgcttgaatgaccaatttgtaagcaataaattctatgacacgaatggtcgaacaaccctacaccctaaggaagtagaaaagaacacagtgcgcgacttcccgattcctaagattcgtgatgtacgaaagtatccagaaatcacaattccaaaagagaaaaaacttggtgaaattgagtttattaagatcaataagaatgataaaaaaccactgagagatgcggtctttagtcttcaaaaacaacatccggattatccagatatttatggagctattgatcaaaatggcacttatcaaaatgtgagaacaggtgaagatggtaagttgacctttaaaaatctgtcagatgggaaatatcgattatttgaaaattctgaaccagctggttataaacccgttcaaaataagcctatcgttgccttccaaatagtaaatggagaagtcagagatgtgacttcaatcgttccacaagatataccagcgggttacgagtttacgaatgataagcactatatcacaaatgagccaattcctccaaaaagagaatatcctcgaactggtggtatcggaatgttgccattctatctgataggttgcatgatgatgggaggagttctattatacacacggaaaaatccgtaaagtgtagcaatgagaaatgataatatcgatactctgagcgatacttttaagaagtagcactcaagaagagatttaagtttacttggtgaaaacagttttcttcgccaagtaaaccaccattgaaaggggagatgttttcgaaaacttgcacagaaaaaaggattattattgtcatgtgtaattcattacattgctcacagttgattttaagagatatgaataaggagaaatcatgaaatcaatcaacaaatttttaacaatgcttgctgccttattactgacagcgagtagcctgttttcagctgcaacagtttttgcggcggacaatgttagtacagcaccagatgctgttactaaaactttaacaatccataagttactgctctcagaagatgatttaaagacttgggatacaaacggtcctaaaggatatgatggaactcaatctagtttaaaagatttaactggagttgtagctgaggaaattccaaatgtatactttgaattacaaaagtataatttgactgatggtaaggaaaaagaaaatcttaaagatgatagtaaatggacaacagttcatggtggtttgacaactaaagatggacttaaaattgaaaccagtactcttaaaggtgtgtatcgtattcgtgaggatagaacaaagactacctatgttggtcctaatgggcaagtattaacaggttcaaaagccgtacctgctcttgtaactcttccacttgttaacaataatggtacagtaattgatgcacatgttttccctaaaaattcatataataaaccagttgtagataaaagaattgctgatactttgaattataacgatcaaaatggtctgtctatcggtactaaaatcccatatgttgttaatacaacaattccaagtaatgcaacatttgcaacttcattttggtcagatgaaatgacagaaggtctaacttataatgaagatgtaacaattactttgaataatgtagctatggatcaagctgattatgaagtcactaaaggaattaatggctttaacttaaaattaacagaagcaggtttagctaaaattaatggtaaggatgcagaccaaaaaatccaaattacttactcagctactttgaactcacttgctgttgcagacattcctgaaagtaacgatattacatatcattacggaaatcatcaagatcatgggaatactccaaaaccaactaaacctaataatggtcaaattacagtaactaagacatgggacagtcaacctgctcctgagggggtgaaagcgactgttcaacttgtaaatgccaagactggtgagaaagtcggtgctcctgtagaactttcagaaaataattggacatatacttggagtggtctagataattctattgaatacaaagttgaagaagaatataatggatactcagctgaatacacagtagagagcaaagggaagttgggggtaaaaaactggaaagataataacccagctccaatcaatcttgaagaaccacgtgtaaaaacatacggtaaaaagtttgtcaaagtagaccaaaaagatactcgtctagaaaatgcgcagttcgttgttaaaaaagcagatagcaataaatatattgcctttaagtcaactgcacaacaagctgcagatgaaaaagcagcagcaactgcaaaacaaaaattggatgcagcggtagcagcttacacaaatgctgcagataagcaagccgctcaagctctagtagatcaagcacagcaagaatacaatgtagcttacaaagaagccaaatttggttatgttgaagtagctggaaaagatgaagcaatggttcttacttctaatacggatggtcaattccaaatttcaggtcttgctgctggtacttataaattagaagaaattaaagctccagaaggttttgcgaaaattgatgatgtagaatttgttgttggagcaggttcttggaatcaaggtgagtttaattacttaaaagatgttcaaaagaatgacgctacaaaagtagtcaacaaaaaaatcacgatcccacaaacgggtggtattggtacaattatctttgctgtagcaggggctgtgattatgggtattgcagtgtacgcatatgttaaaaacaacaaagatgaggatcaacttgcttaagtaagagagaaaggagccattgatgacaatgcagaaaatgcagaaaatgattagtcgtatcttctttgttatggctctgtgtttttctcttgtatggggtgcacatgcagtccaagcgcaagaagatcacacgttggtcttgcaattggagaactatcaggaggtggttagtcaattgccatctcgtgatggtcatcggttgcaggtatggaagttggatgattcgtattcctatgataatcgggtgcaaattgtgagagacttgcattcgtgggatgagaataaactttcttctttcaaaaagacttcgtttgagatgaccttccttgagaatcagattgaagtatctcatattccaaatggtctttactatgttcgctctattatccagacggatgcggtttcttatccagctgaatttctttttgaaatgacagatcagacggtagagcctttggtcattgtagcgaaaaaagcagatacggtgacaacaaaggtgaagctgataaaggtggatcaagaccacaatcgcttggagggtgtcggctttaaattggtatcagtagcaagagatggttctgaaaaagaggttcccttgattggagaataccgttacagttcttctggtcaagtagggagaactctctatactgataaaaatggagagattgttgtgacaaatcttcctcttgggacctatcgtttcaaggaggtggagccactggcaggctatgctgttacgacgatggatacggatgtccagttggtagatcatcagctggtgacgattacggttgtcaatcagaaattaccacgtggcaatgttgactttatgaaggtggatggtaggaccaatacctctcttcaaggggcaatgttcaaagtcatgaaagaagaaaacggacactatactcctgttcttcaaaatggtaaggaagtagttgtggcatcagggaaagatggtcgtttccgagtggaaggtctagagtatgggacatactatttatgggagctccaagctccaactggttatgttcaattaacatcgcctgtttcctttacaatcgggaaagatactcgtaaggaactggtaacagtggttaaaaataacaagcgaccacggattgatgtgccagatacaggggaagaaaccttgtatatcttgatgcttgttgccattttgttgtttggtagtggctattatcttacgaaaaaaacaaataactgatattcaatgtacatcattatgaaaaagatagcaggctgaagggaagaccagagtactctgaggtgatgttaatcaggaatcatggtgatttggcatgaatcataataacggatatgaggctgggcagattgtgccagcctcattgtgggttattgtttgtaaaacgataggactggtctggtaatcattttaggaatggacaggactgggattctgatttaaaatggatggtgaatcagaaagaaatgagattttctcgtttctcttagcagataggattgtctgttaggaaaagcgataaaatgatgagtttgaagttaaaggaatgctgataaaaaatggcaaaaacaaaaaagcaaaaacgaaacaatctcctattaggagtggtatttttcattggaatagcggtaatggcgtatccgctggtgtctcgcttgtattatcgagtggaatcaaatcaacaaattgctgactttgataaggaaaaagcaacgttggatgaggctgacattgatgaacgaatgaaattggcacaagccttcaatgactctttgaataatgtagtgagtggcgatccttggtcggaagaaatgaagaaaaaagggcgagcagagtatgcacgcatgttagaaatccatgagcggatggggcatgtggaaatccctgctattgatgtagatttgccggtttatgctggtactgctgaagaggtattgcagcaaggcgctggacatctagagggaacttctctaccgatcggaggcaattcgacccatgcggtgattacggcacatacaggtttgccaacggctaagatgtttacggatttgaccaaacttaaagttggggataagttttatgtgcacaatatcaaggaagtgatggcctatcaagtggatcaagtaaaggtgattgagccgacgaactttgatgatttattgattgtaccaggtcatgattatgtgaccttgctgacctgtacgccatacatgatcaatacccatcgtctattggttcgggggcatcggataccgtacgtagcagaggttgaggaagaatttattgcggcaaacaaactcagtcatctctatcgctacctgttttatgtggcagttggtttgattgtgattcttttatggattattcgacgcttgcgcaagaagaaacggcaatcagaaagagctttgaaagcattgaaggaagctactaaggaagtgaaggtagaggatgagtaagagtagatattcacggaaaaagagcgtgaaaaagaagaaaaatccgttcattcttcttctgatttttttggtggggcttgccgttgcgatgtatcccttggtgtctcgttattattatcgtattgagtcaaacgaggttattaaagagtttgatgagacggtttcccagatggataaggcggaacttgaggagcgttggcgcttggctcaagccttcaatgcgaccttgaaaccatctgaaattcttgatccttttacagagcaagagaaaaagaaaggcgtctcagaatatgccaatatgctaaaggtccatgagcggattggctatgtggaaattcctgcgattgatcaggaaattccgatgtatgtcggaacgagtgaggaaattcttcagaagggcgcaggattgctagagggagcttcgttaccggttggtggtgaaaatacccacacagttgtcactgctcatagaggattaccgacggcagaactgtttagtcaattggataagatgaaaaaaggggatatcttttatcttcacgttttagatcaggtgttggcctaccaagtggatcagatagtgacggtggagccgaatgactttgagcctgtcttgattcaacatggggaagattatgcgaccttgttgacttgtacaccgtatatgattaacagtcatcgtctgttggtacgtgggaagcggattccgtatacggcaccaattgcagagcggaatcgagcggtgagagagcgtgggcaattctggttgtggttattactaggagcgatggcggtcatccttctcttgctgtatcgcgtgtatcgtaatcgacggattgtcaaaggactagaaaagcaattggaggggcgtcatgtcaaggactaaactacgagccttattgggatacttgttgatgttggtagcctgtttgattcctatttattgttttggacagatggtgttgcagtctcttggacaggtgaaaggtcatgctacatttgtgaaatccatgacaactgaaatgtaccaagaacaacagaaccattctctcgcctacaatcaacgcttggcttcgcaaaatcgcattgtagatccttttttggcggagggatatgaggtcaattaccaagtgtctgacgaccctgatgcagtctatggttacttgtctattccaagtttggaaatcatggagccggtttatttgggagcagattatcatcatttagggatgggcttggctcatgtggatggtacaccgctgcctctggatggtacagggattcgctcagtgattgctgggcaccgtgcagagccaagccatgtctttttccgccatttggatcagctaaaagttggagatgctctttattatgataatggccaggaaattgtagaatatcagatgatggacacagagattattttaccgtcggaatgggaaaaattagaatcggttagctctaaaaatatcatgaccttgataacctgcgatccgattcctacctttaataaacgcttattagtgaattttgaacgagtcgctgtttatcaaaaatcagatccacaaacagctgcagttgcgagggttgcttttacgaaagaaggacaatctgtatcgcgtgttgcaacctctcaatggttgtaccgtgggctagtggtactggcatttctgggaatcctgtttgttttgtggaagctagcacgtttactacgagggaaataaaaagaaatgaaaggaaagctaaggctgttcctttttccggctctttgtcaactgt

SEQ ID NO: 501 - DNA, 11405 bp, S. pneumoniae
ttttcattataaatcttatgggacttttttgatactcaaaaagccctataatctccacagtgggatttacccactacagaaattatagagccagaaaaaacacttttgttcactagcagaaactagagagcagaagtgtttttctgttcagatttacccaaaactgggaaatatggggataagaatagagatggcttaggaagcccctttttgtgtgtagacagtacgatgaacttataacaaatagtgagcctttttagcaatcattgcgacccgtttgtcaaaagcctcttttcggatatctacaattgtctgatagatgagacgctgttggctaacatgcaaatctaaggcaatcgtcaaaaagtgatgtttccctttgggatactgctttttaacgtaaggcaggtattctttcgttgtaataataatcaatggctctgtcaaatgctcctctgaaggaggaggactaattagaatattgtatcctgtaacagaggcaactttgtcagtaaaattccgtaaaataatggactttattaagtttacatctgcttgattatttaaaatgataaaaatcgggatagcaggtagtgaggaaaagatggtttctgtcaagtagagtgagaaaaggtacagccgatgctggtcgataactccttcaatcttctgctcagtcatccactcttgaacaattgctttcgaaatatgatacagtggcttgtcgctttcaatcccataatgttcgtaataattataatagggaactagattttgtaaaccaaacaaaaacgttcttgttaagaaagtcagtgctgttaaaaaagaaagagaattcgaaatgtcatttcctaagatattcttgaacttggatagtagatgctttcctcttgtatgctgaagaatcagttgaatagtatgagtctttttttcttgattccatttgtccttggaaaacgaagaattagcagaacaataaaccaaaaagatataatccagttcttcctgagtaaaagtcatgttggcatgtggctctaagtaagtttggcaatgttccatcaaaatcggatacataaagaggttttttaatttttcaaactctttggactcagggaactcaagtggaaattcccgacgtttccaagtgagtgccactagtatgctaaaatgaacatactcgtcaggtgtgatttctaacagttcatgactgagttgagaattagactgcacaatcatatgtgtgacccaatccatacttccatcattcaaatcataaatctcaataccaaaatgaaactggaggagtgcaattaaaaaacgaatgcgatattcaggaccaactacttgatttttcacaaggtccaaacctactgaacgtagtaacaagccacacttttgtcgtacgcggtagcctgttgcgatggaaatatactctttttgtgtaaattcgttaaagctttgattaccttgtagtagaaagaagcggagtatttttaaaatagttgattggttataaagctgatggaagtaataattcgtttgatgagaatggtgttcgattaattgaacttgttgcgtatctaaattaaatgtcaactcttcctcgaatgtttcttgtaattcctgcaaaatgcttaggagacttttagattgtaatgaagttaaagtagacagttcatctagttcaatagaccgaatatccaataatatatttaaaatggtaattttatctgtaattcttttttcaatgtatttgtttagcatagttaccgaatcttagttgcatatagataattttaattattataatacaaaagaaactaattgtcttgtcaaaaaggttgtggaatttccgactttattgataaaacagcatgtaataaaaggcattttaaagatagtaatgagtattggtggagttttatggcttattttttttattagaaaatatttttttatcaaatattgtcgttctataaaaaaatatgtgataaaaatatctattgtgatggaagttgttttaatttatactaggatagttaatagtaatactatactatactatattgtatacaagtgtgtcattgccaggttgagaagatagctataacgcacttttatacgcttttgctacgtttgttagtgaacggattaactcagtgagataaattttatcagaacataagtaatccgtttcttcgtgtatacagattgaaagtacctatgaatcatagaaggattaacttgttctatgaataatgcttaacagggagacacacatgaaaaaagtaagaaagatatttcagaaggcagttgcaggactgtgctgtatatctcagttgacagctttttcttcgatagttgctttagcagaaacgcctgaaaccagtccagcgataggaaaagtagtgattaaggagacaggcgaaggaggagcgcttctaggagatgccgtctttgagttgaaaaacaatacggatggcacaactgtttcgcaaaggacagaggcgcaaacaggagaagcgatattttcaaacataaaacctgggacatacaccttgacagaagcccaacctccagttggttataaaccctctactaaacaatggactgttgaagttgagaagaatggtcggacgactgtccaaggtgaacaggtagaaaatcgagaagaggctctatctgaccagtatccacaaacagggacttatccagatgttcaaacaccttatcagattattaaggtagatggttcggaaaaaaacggacagcacaaggcgttgaatccgaatccatatgaacgtgtgattccagaaggtacactttcaaagagaatttatcaagtgaataatttggatgataaccaatatggaatcgaattgacggttagtgggaaaacagtgtatgaacgaaaagataagtctgtgccgctggatgtcgttatcttgctcgataactcaaatagtatgagtaacattcgaaacaagaatgctcgacgtgcggaaagagctggtgaggcgacacgttctcttattgataaaattacatctgatccagaaaatagggtagcgcttgtgacttatgcttccactatctttgatgggaccgagtttacagtagaaaaaggggtagcagataaaaacggaaaacgattgaatgattctcttttttggaattatgatcagacgagttttacaaccaataccaaagattatagttatttaaagctgactaatgataagaatgacattgtagaattaaaaaataaggtacctaccgaggcagaagatcatgatggaaatagattgatgtaccaattcggtgccacttttactcagaaagctttgatgaaggcagatgagattttgacacaacaagcgagacaaaatagtcaaaaagtcattttccatattacggatggtgtcccaactatgtcgtatccgattaattttaatcatgctacgtttgctccatcatatcaaaatcaactaaatgcattttttagtaaatctcctaataaagatggaatactattaagtgattttattacgcaagcaactagtggagaacatacaattgtacgcggagatgggcaaagttaccagatgtttacagataagacagtttatgaaaaaggtgctcctgcagctttcccagttaaacctgaaaaatattctgaaatgaaggcggttggttatgcagttataggcgatccaattaatggtggatatatttggcttaattggagagagagtattctggcttatccgtttaattctaatactgctaaaattaccaatcatggtgcccctacaagatggtactataacgggaatattgctcctgatgggtatgatgtctttacggtaggtattggtattaacggagatcctggtacggatgaagcaacggctactagttttatgcaaagtatttctagtaaacctgaaaactataccaatgttactgacacgacaaaaatattggaacagttgaatcgttatttccacaccatcgtaactgaaaagaaatcaattgagaatggtacgattacagatccgatgggtgagttaattgatttgcaattgggcacagatggaagatttgatccagcagattacactttaactgcaaacgatggtagtcgcttggagaatggacaagctgtaggtggtccacaaaatgatggtggcttgctaaaaaatgcaaaagtgttctatgatacgactgagaaaaggattcgtgtaacaggtttgtaccttggaacgggtgaaaaagttacattgacttataatgttcgcttgaatgaccaatttgtaagcaataaattctatgacacgaatggtcgaacaaccctacaccctaaggaagtagaaaagaacacagtgcgcgacttcccgattcctaagattcgtgatgtgcgaaaatatccagcaattacgattgcaaaagagaaaaaacttggtgaaattgagtttattaagatcaataagaatgataaaaaaccactgagagatgcggtctttagtcttcaaaaacaacatccggattatccagatatttatggagctattgatcaaaatggcacttatcaaaatgtgagaacaggtgaagatggtaagttgacctttaaaaatctgtcagatgggaaatatcgattatttgaaaattctgaaccagctggttataaacccgttcaaaataagcctatcgttgccttccaaatagtaaatggagaagtcagagatgtgacttcaatcgttccacaagatataccagcgggttacgagtttacgaatgataagcactatattaccaatgaacctattcctccaaagagagaatatcctcgaactggtggtatcggaatgttgccattctatctgataggttgcatgatgatgggaggagttctattatacacacggaaacatccgtaaagtgtagaaatgataatatctatgttctgaacaatacttttaagaagtagcactcaagaagagatttaagtttacttggtgaaaccagttttcttcgccaagtaaaccaccattgaaaggggagatgttttcgaaaacttgcacagaaaaaggattattattgtcatgtgtaattcattacattgctcacagttgattttaagagataaataaggagaaatcatgaaatcaatcaacaaatttttaacaatgcttgctgccttattattgacagcgagtagcctgttttcagctgcaacagtttttgcggctgggacgacaacaacatctgttaccgttcataaactattggcaacagatggggatatggataaaattgcaaatgagttagaaacaggtaactatgctggtaataaagtgggtgttctacctgcaaatgcaaaagaaattgccggtgttatgttcgtttggacaaatactaataatgaaattattgatgaaaatggccaaactctaggagtgaatattgatccacaaacatttaaactctcaggggcaatgccggcaactgcaatgaaaaaattaacagaagctgaaggagctaaatttaacacggcaaatttaccagctgctaagtataaaatttatgaaattcacagtttatcaacttatgtcggtgaagatggagcaaccttaacaggttctaaagcagttccaattgaaattgaattaccattgaacgatgttgtggatgcgcatgtgtatccaaaaaatacagaagcaaagccaaaaattgataaagatttcaaaggtaaagcaaatccagatacaccacgtgtagataaagatacacctgtgaaccaccaagttggagatgttgtagagtacgaaattgttacaaaaattccagcacttgctaattatgcaacagcaaactggagcgatagaatgactgaaggtttggcattcaacaaaggtacagtgaaagtaactgttgatgatgttgcacttgaagcaggtgattatgctctaacagaagtagcaactggttttgatttgaaattaacagatgctggtttagctaaagtgaatgaccaaaacgctgaaaaaactgtgaaaatcacttattcggcaacattgaatgacaaagcaattgtagaagtaccagaatctaatgatgtaacatttaactatggtaataatccagatcacgggaatactccaaagccgaataagccaaatgaaaacggcgatttgacattgaccaagacatgggttgatgctacaggtgcaccaattccggctggagctgaagcaacgttcgatttggttaatgctcagactggtaaagttgtacaaactgtaactttgacaacagacaaaaatacagttactgttaacggattggataaaaatacagaatataaattcgttgaacgtagtataaaagggtattcagcagattatcaagaaatcactacagctggagaaattgctgtcaagaactggaaagacgaaaatccaaaaccacttgatccaacagagccaaaagttgttacatatggtaaaaagtttgtcaaagttaatgataaagataatcgtttagctggggcagaatttgtaattgcaaatgctgataatgctggtcaatatttagcacgtaaagcagataaagtgagtcaagaagagaagcagttggttgttacaacaaaggatgctttagatagagcagttgctgcttataacgctcttactgcacaacaacaaactcagcaagaaaaagagaaagttgacaaagctcaagctgcttataatgctgctgtgattgctgccaacaatgcatttgaatgggtggcagataaggacaatgaaaatgttgtgaaattagtttctgatgcacaaggtcgctttgaaattacaggccttcttgcaggtacatattacttagaagaaacaaaacagcctgctggttatgcattactaactagccgtcagaaatttgaagtcactgcaacttcttattcagcgactggacaaggcattgagtatactgctggttcaggtaaagatgacgctacaaaagtagtcaacaaaaaaatcacgatcccacaaacgggtggtattggtacaattatctttgctgtagcaggggctgtgattatgggtattgcagtgtacgcatatgttaaaaacaacaaagatgaggatcaacttgcttaagtaagagagaaaggagccattgatgacaatgcagaaaatgcagaaaatgattagtcgtatcttctttgttatggctctgtgtttttctcttgtatggggtgcacatgcagtccaagcgcaagaagatcacacgttggtcttgcaattggagaactatcaggaggtggttagtcaattgccatctcgtgatggtcatcggttgcaggtatggaagttggatgattcgtattcctatgataatcgggtgcaaattgtgagagacttgcattcgtgggatgagaataaactttcttctttcaaaaagacttcgtttgagatgaccttccttgagaatcagattgaagtatctcatattccaaatggtctttactatgttcgctctattatccagacggatgcggtttcttatccagctgaatttctttttgaaatgacagatcagacggtagagcctttggtcattgtagcgaaaaaagcagatacggtgacaacaaaggtgaagctgataaaggtggatcaagaccacaatcgcttggagggtgtcggctttaaattggtatcagtagcaagagatggttctgaaaaagaggttcccttgattggagaataccgttacagttcttctggtcaagtagggagaactctctatactgataaaaatggagagattgttgtgacaaatcttcctcttgggacctatcgtttcaaggaggtggagccactggcaggctatactgttacgacgatggatacggatgtccagttggtagatcatcagctggtgacgattacggttgtcaatcagaaattaccacgtggcaatgttgactttatgaaggtggatggtaggaccaatacctctcttcaaggggcaatgttcaaagtcatgaaagaagaaaacggacactatactcctgttcttcaaaatggtaaggaagtagttgtggcatcagggaaagatggtcgtttccgagtggaaggtctagagtatgggacatactatttatgggagctccaagctccaactggttatgttcaattaacatcgcctgtttcctttacaatcgggaaagatactcgtaaggaactggtaacagtggttaaaaataacaagcgaccacggattgatgtgccagatacaggggaagaaaccttgtatatcttgatgcttgttgccattttgttgtttggtagtggctattatcttacgaaaaaaacaaataactgatattcaatgtacatcattatgaaaaagatagcaggctgaagggaagaccagagtactctgaggtgatgttaatcaggaatcatggtgatttggcatgaatcataataacggatatgaggctgggcagattgtgccagcctcattgtgggttattgtttgtaaaacgataggactggtctggtaatcattttaggaatggacaggactgggattctgatttaaaatggatggtgaatcagaaagaaatgagattttctcgtttctcttagcagataggattgtctgttaggaaaagcgataaaatgatgagtttgaagttaaaggaatgctgataaaaaatggcaaaaacaaaaaagcaaaaacgaaacaatctcctattaggagtggtatttttcattggaatggcggtaatggcgtatccgctggtgtctcgcttgtattatcgagtggaatcaaatcaacaaattgctgactttgataaggaaaaagcaacgttggatgaggctgacattgatgaacgaatgaaattggcacaagccttcaatgactctttgaataatgtagtgagtggcgatccttggtcggaagaaatgaagaaaaaagggcgagcagagtatgcacgcatgttagaaatccatgagcggatggggcatgtggaaatccctgctattgatgtagatttgccggtttatgctggtactgctgaagaggtattgcagcaaggcgctggacatctagagggaacttctctaccgatcggaggcaattcgacccatgcggtgattacggcacatacaggtttgccaacggctaagatgtttacggatttgaccaaacttaaagttggggataagttttatgtgcacaatatcaaggaagtgatggcctatcaagtggatcaagtaaaggtgattgagccgacgaactttgatgatttattgattgtaccaggtcatgattatgtgaccttgctgacctgtacgccatacatgatcaatacccatcgtctattggttcgggggcatcggataccgtacgtagcagaggttgaggaagaatttattgcggcaaacaaactcagtcatctctatcgctacctgttttatgtggcagttggtttgattgtgattcttttatggattattcgacgcttgcgcaagaagaaacggcaatcagaaagagctttgaaagcattgaaggaagctactaaggaagtgaaggtagaggatgagtaagagtagatattcacggaaaaagagcgtgaaaaagaagaaaaatccgttcattcttcttctgatttttttggtggggcttgccgttgcgatgtatcccttggtgtctcgttattattatcgtattgagtcaaacgaggttattaaagagtttgatgagacggtttcccagatggataaggcggaacttgaggagcgttggcgcttggctcaagccttcaatgcgaccttgaaaccatctgaaatcctcgatccttttacagatcaggaaaagaaacagggagtttcagaatatgctaacatgctaaaagttcatgagcgtatcggatatgtagaaattcctgcgattgaacaggaaatccccatgtatgttggcacaagtgaagacattcttcagaaaggggcagggctgttagaaggggcttcgctgcctgttggaggtgaaaatacccatacagtgatcactgctcacagaggattgccaacggcagaattgttcagtcaattggataagatgaagaaaggggatatcttttatcttcacgttttagaccaggttttggcctatcaagtggatcagatagtgacggtggagccgaatgattttgagcctgttctgattcaacatggacaagattatgcgactttactgacttgtacgccatacatgattaacagccaccgtttgttggtacgtgggaaacggattccatatacagcgccgattgctgagcggaatcgagcggtgagagagcgtgggcaattctggttgtggttattactaggagcgatggcggtcatccttctcttgctgtatcgcgtgtatcgtaatcgacggattgtcaaaggactagaaaagcaattggaggggcgtcatgtcaaggactaaactacgagccttattgggatacttgttgatgttggtagcctgtttgattcctatttattgttttggacagatggtgttgcagtctcttggacaggtgaaaggtcatgctacatttgtgaaatccatgacaactgaaatgtaccaagaacaacagaaccattctctcgcctacaatcaacgcttggcttcgcaaaatcgcattgtagatccttttttggcggagggatatgaggtcaattaccaagtgtctgacgaccctgatgcagtctatggttacttgtctattccaagtttggaaatcatggagccggtttatttgggagcagattatcatcatttagggatgggcttggctcatgtggatggtacaccgctgcctctggatggtacagggattcgctcagtgattgctgggcaccgtgcagagccaagccatgtctttttccgccatttggatcagctaaaagttggagatgctctttattatgataatggccaggaaattgtagaatatcagatgatggacacagagattattttaccgtcggaatgggaaaaattagaatcggttagctctaaaaatatcatgaccttgataacctgcgatccgattcctacctttaataaacgcttattagtgaattttgaacgagtcgctgtttatcaaaaatcagatccacaaacagctgcagttgcgagggttgcttttacgaaagaaggacaatctgtatcgcgtgttgcaacctctcaatggttgtaccgtgggctagtggtactggcatttctgggaatcctgtttgttttgtggaagctagcacgtttactacgagggaaataaaaagaaatgaaaggaaagctaaggctgttcctttttccggctctttgtcaactgtagt

SEQ ID NO: 502 - DNA, 11448 bp, S. pneumoniae
tttaggcgcttttcattataagtcttatgggacttttttgatactcaaaaagccctataatctccacagtgggatttacccactacagaaattatagagccagaaaaaacacttttgttcactagcagaaactagagagcagaagtgtttttctgttcagatttacccaaaactgggaaatatggggataagaatagagatggcttaggaagcccctttttgtgtgtagacagtacgatgaacttataacaaatagtgagcctttttagcaatcattgcgacccgtttgtcaaaagcctcttttcggatatctacaattgtctgatagatgagacgctgttggctaacatgcaaatctaaggcaatcgtcaaaaagtgatgtttccctttgggatactgctttttaacgtaaggcaggtattctttcgttgtaataataatcaatggctctgtcaaatgctcctctgaaggaggaggactaattagaatattgtatcctgtaacagaggcaactttgtcagtaaaattccgtaaaataatggactttattaagtttacatctgcttgattatttaaaatgataaaaatcgggatagcaggtagtgaggaaaagatggtttctgtcaagtagagtgagaaaaggtacagccgatgctggtcgataactccttcaatcttctgctcagtcatccactcttgaacaattgctttcgaaatatgatacagtggcttgtcgctttcaatcccataatgttcgtaataattataatagggaactagattttgtaaaccaaacaaaaacgttcttgttaagaaagtcagtgctgttaaaaaagaaagagaattcgaaatgtcatttcctaagatattcttgaacttggatagtagatgctttcctcttgtatgctgaagaatcagttgaatagtatgagtctttttttcttgattccatttgtccttggaaaacgaagaattagcagaacaataaaccaaaaagatataatccagttcttcctgagtaaaagtcatgttggcatgtggctctaagtaagtttggcaatgttccatcaaaatcggatacataaagaggttttttaatttttcaaactctttggactcagggaactcaagtggaaattcccgacgtttccaagtgagtgccactagtatgctaaaatgaacatactcgtcaggtgtgatttctaacagttcatgactgagttgagaattagactgcacaatcatatgtgtgacccaatccatacttccatcattcaaatcataaatctcaataccaaaatgaaactggaggagtgcaattaaaaaacgaatgcgatattcaggaccaactacttgatttttcacaaggtccaaacctactgaacgtagtaacaagccacacttttgtcgtacgcggtagcctgttgcgatggaaatatactctttttgtgtaaattcgttaaagctttgattaccttgtagtagaaagaagcggagtatttttaaaatagttgattggttataaagctgatggaagtaataattcgtttgatgagaatggtgttcgattaattgaacttgttgcgtatctaaattaaatgtcaactcttcctcgaatgtttcttgtaattcctgcaaaatgcttaggagacttttagattgtaatgaagttaaagtagacagttcatctagttcaatagaccgaatatccaataatatatttaaaatggtaattttatctgtaattcttttttcaatgtatttgtttagcatagttaccgaatcttagttgcatatagataattttaattattataatacaaaagaaactaattgtcttgtcaaaaaggttgtggaatttccgactttattgataaaacagcatgtaataaaaggcattttaaagatagtaatgagtattggtggagttttatggcttattttttttattagaaaatattttttatcaaatattgtcgttctataaaaaaatatgtgataaaaatatctattgtgatggaagttgttttaatttatactaggatagttaatagtaatactatactatactatattgtatacaagtgtgtcattgccaggttgagaagatagctataacgcacttttatacgcttttgctacgtttgttagtgaacggattaactcagtgagataaattttatcagaacataagtaatccgtttcttcgtgtatacagattgaaagtacctatgaatcatagaaggattaacttgttctatgaataatgcttaacagggagacacacatgaaaaaagtaagaaagatatttcagaaggcagttgcaggactgtgctgtatatctcagttgacagctttttcttcgatagttgctttagcagaaacgcctgaaaccagtccagcgataggaaaagtagtgattaaggagacaggcgaaggaggagcgcttctaggagatgccgtctttgagttgaaaaacaatacgaatggcacaactgtttcgcaaaggacagaggcgcaaacaggagaagcgatattttcaaacataaaacctgggacatacaccttgacagaagcccaacctccagttggttataaaccctctactaaacaacggactgttgaagttgagaagaatggtcggacgactgtccaaggtgaacaggtagaaaatcgagaagaggctctatctgaccagtatccacaaacagggacttatccagatgttcaaacaccttatcagattattaaggtagatggttcggaaaaaaacggacagcacaaggcgttgaatccgaatccatatgaacgtgtgattccagaaggtacactttcaaagagaatttatcaagtgaataatttggatgataaccaatatggaatcgaattgacggttagtgggaaaacagtgtatgaacgaaaagataagtctgtgccgctggatgtcgttatcttgctcgataactcaaatagtatgagtaacattcgaaacaagaatgctcgacgtgcggaaagagctggtgaggcgacacgttctcttattgataaaattacatctgatccagaaaatagggtagcgcttgtgacttatgcttccactatctttgatgggaccgagtttacagtagaaaaaggggtagcagataaaaacggaaaacgattgaatgattctcttttttggaattatgatcagacgagttttacaaccaataccaaagattatagttatttaaagctgactaatgataagaatgacattgtagaattaaaaaataaggtacctaccgaggcagaagaccatgatggaaatagattgatgtaccaattcggtgccacttttactcagaaagctttgatgaaggccgatgagattttgacacaacaagcgagacaaaatagtcaaaaagtcattttccatattacggatggtgtcccaactatgtcgtatccgattaattttaatcatgctacgtttgctccatcatatcaaaatcaactaaatgtattttttagtaaatctcctaataaagatggaatactattaagtgattttattacgcaagcaactagtggagaacatacaattgtacgcggagatgggcaaagttaccagatgtttacagataagacagtttatgaaaaaggtgctcctgcagctttcccagttaaacctgaaaaatattctgaaatgaaggcggttggttatgcagttataggcgatccaattaatggtggatatatttggcttaattggagagagagtattctggcttatccgtttaattctaatactgctaaaattaccaatcatggtgaccctacaagatggtactataacgggaatattgctcctgatgggtatgatgtctttacggtaggtattggtattaacggagatcctggtacggatgaagcaacggctactagttttatgcaaagtatttctagtaaacctgaaaactataccaatgttactgacacgacaaaaatattggaacagttgaatcgttatttccacaccatcgtaactgaaaagaaatcaattgagaatggtacgattacagatccgatgggtgagttaattgatttgcaattgggcacagatggaagatttgatccagcagattacactttaactgcaaacgatggtagtcgcttggagaatggacaagctgtaggtggtccacaaaatgatggtggcttgctaaaaaatgcaaaagtgttctatgatacgactgagaaaaggattcgtgtaacaggtttgtaccttggaacgggtgaaaaagttacattgacttataatgttcgcttgaatgaccaatttgtaagcaataaattctatgacacgaatggtcgaacaaccctacaccctaaggaagtagaaaagaacacagtgcgcgacttcccgattcctaagattcgtgatgtgcgaaaatatccagcaattacgattgcaaaagagaaaaaacttggtgaaattgagtttattaagatcaataagaatgataaaaaaccactgagagatgcggtctttagtcttcaaaaacaacatccggattatccagatatttatggagctattgatcaaaatggcacttatcaaaatgtgagaacaggtgaagatggtaagttgacctttaaaaatctgtcagatgggaaatatcgattatttgaaaattctgaaccagctggttataaacccgttcaaaataagcctatcgttgccttccaaatagtaaatggagaagtcagagatgtgacttcaatcgttccacaagatataccagcgggttacgagtttacgaatgataagcactatattaccaatgaacctattcctccaaagagagaatatcctcgaactggtggtatcggaatgttgctattctatctgataggttgcatgatgatgggaggagttctattatacacacggaaacatccgtaaagtgtagaaatgataatatctatgttctgaacgatacttttaagaagtagcactcaagaagagatttaagtttacttggtgaaaccagttttcttcgccaagtaaaccaccattgaaaggggagatgttttcgaaaacttgcacagaaaaaggattattattgtcatgtgtaattcattacattgctcacagttgattttaagagataaataaggagaaatcatgaaatcaatcaacaaatttttaacaatgcttgctgccttattactgacagcgagtagcctgttttcagctgcaacagtttttgcggctgggacgacaacaacatctgttaccgttcataaactattggcaacagatggggatatggataaaattgcaaatgagttagaaacaggtaactatgctggtaataaagtgggtgttctacctgcaaatgcaaaagaaattgccggtgttatgttcgtttggacaaatactaataatgaaattattgatgaaaatggccaaactctaggagtgaatattgatccacaaacatttaaactctcaggggcaatgccggcaactgcaatgaaaaaattaacagaagctgaaggagctaaatttaacacggcaaatttaccagctgctaagtataaaatttatgaaattcacagtttatcaacttatgtcggtgaagatggagcaaccttaacaggttctaaagcagttccaattgaaattgaattaccattgaacgatgttgtggatgcgcatgtgtatccaaaaaatacagaagcaaagccaaaaattgataaagatttcaaaggtaaagcaaatccagatacaccacgtgtagataaagatacacctgtgaaccaccaagttggagatgttgtagagtacgaaattgttacaaaaattccagcacttgctaattatgcaacagcaaactggagcgatagaatgactgaaggtttggcattcaacaaaggtacagtgaaagtaactgttgatgatgttgcacttgaagcaggtgattatgctctaacagaagtagcaactggttttgatttgaaattaacagatgctggtttagctaaagtgaatgaccaaaacgctgaaaaaactgtgaaaatcacttattcggcaacattgaatgacaaagcaattgtagaagtaccagaatctaatgatgtaacatttaactatggtaataatccagatcacgggaatactccaaagccgaataagccaaatgaaaacggcgatttgacattgaccaagacatgggttgatgctacaggtgcaccaattccggctggagctgaagcaacgttcgatttggttaatgctcagactggtaaagttgtacaaactgtaactttgacaacagacaaaaatacagttactgttaacggattggataaaaatacagaatataaattcgttgaacgtagtataaaagggtattcagcagattatcaagaaatcactacagctggagaaattgctgtcaagaactggaaagacgaaaatccaaaaccacttgatccaacagagccaaaagttgttacatatggtaaaaagtttgtcaaagttaatgataaagataatcgtttagctggggcagaatttgtaattgcaaatgctgataatgctggtcaatatttagcacgtaaagcagataaagtgagtcaagaagagaagcagttggttgttacaacaaaggatgctttagatagagcagttgctgcttataacgctcttactgcacaacaacaaactcagcaagaaaaagagaaagttgacaaagctcaagctgcttataatgctgctgtgattgctgccaacaatgcatttgaatgggtggcagataaggacaatgaaaatgttgtgaaattagtttctgatgcacaaggtcgctttgaaattacaggccttcttgcaggtacatattacttagaagaaacaaaacagcctgctggttatgcattactaactagtcgtcagaaatttgaagtcactgcaacttcttattcagcgactggacaaggcattgagtatactgctggttcaggtaaagatgacgctacaaaagtagtcaacaaaaaaatcacgatcccacaaacgggtggtattggtacaattatctttgctgtagcaggggctgtgattatgggtattgcagtgtacgcatatgttaaaaacaacaaagatgaggatcaacttgcttaagtaagagagaaaggagccattgatgacaatgcagaaaatgcagaaaatgcagaaaatgcagaaaatgcagaaaatgcagaaaatgattagtcgtatcttctttgttatggctctgtgtttttctcttgtatggggtgcacatgcagtccaagcgcaagaagatcacacgttggtcttgcaattggagaactatcaggaggtggttagtcaattgccatctcgtgatggtcatcggttgcaggtatggaagttggatgattcgtattcctatgataatcgggtgcaaattgtgagagacttgcattcgtgggatgagaataaactttcttctttcaaaaagacttcgtttgagatgaccttccttgagaatcagattgaagtatctcatattccaaatggtctttactatgttcgctctattatccagacggatgcggtttcttatccagctgaatttctttttgaaatgacagatcagacggtagagcctttggtcattgtagcgaaaaaagcagatacggtgacaacaaaggtgaagctgataaaggtggatcaagaccacaatcgcttggagggtgtcggctttaaattggtatcagtagcaagagatggttctgaaaaagaggttcccttgattggagaataccgttacagttcttctggtcaagtagggagaactctctatactgataaaaatggagagattgttgtgacaaatcttcctcttgggacctatcgtttcaaggaggtggagccactggcaggctatactgttacgacgatggatacggatgtccagttggtagatcatcagctggtgacgattacggttgtcaatcagaaattaccacgtggcaatgttgactttatgaaggtggatggtaggaccaatacctctcttcaaggggcaatgttcaaagtcatgaaagaagaaaacggacactatactcctgttcttcaaaatggtaaggaagtagttgtggcatcagggaaagatggtcgtttccgagtggaaggtctagagtatgggacatactatttatgggagctccaagctccaactggttatgttcaattaacatcgcctgtttcctttacaatcgggaaagatactcgtaaggaactggtaacagtggttaaaaataacaagcgaccacggattgatgtgccagatacaggggaagaaaccttgtatatcttgatgcttgttgccattttgttgtttggtagtggctattatcttacgaaaaaaacaaataactgatattcaatgtacatcattatgaaaaagatagcaggctgaagggaagaccagagtactctgaggtgatgttaatcaggaatcatggtgatttggcatgaatcataataacggatatgaggctgggcagattgtgccagcctcattgtgggttattgtttgtaaaacgataggactggtctggtaatcattttaggaatggacaggactgggattctgatttaaaatggatggtgaatcagaaagaaatgagattttctcgtttctcttagcagataggattgtctgttaggaaaagcgataaaatgatgagtttgaagttaaaggaatgctgataaaaaatggcaaaaacaaaaaagcaaaaacgaaacaatctcctattaggagtggtatttttcattggaatagcggtaatggcgtatccgctggtgtctcgcttgtattatcgagtggaatcaaatcaacaaattgctgactttgataaggaaaaagcaacgttggatgaggctgacattgatgaacgaatgaaattggcacaagccttcaatgactctttgaataatgtagtgagtggcgatccttggtcggaagaaatgaagaaaaaagggcgagcagagtatgcacgcatgttagaaatccatgagcggatggggcatgtggaaatccctgctattgatgtagatttgccggtttatgctggtactgctgaagaggtattgcagcaaggcgctggacatctagagggaacttctctaccgatcggaggcaattcgacccatgcggtgattacggcacatacaggtttgccaacggctaagatgtttacggatttgaccaaacttaaagttggggataagttttatgtgcacaatatcaaggaagtgatggcctatcaagtggatcaagtaaaggtgattgagccgacgaactttgatgatttattgattgtaccaggtcatgattatgtgaccttgctgacctgtacgccatacatgatcaatacccatcgtctattggttcgggggcatcggataccgtacgtagcagaggttgaggaagaatttattgcggcaaacaaactcagtcatctctatcgctacctgttttatgtggcagttggtttgattgtgattcttttatggattattcgacgcttgcgcaagaagaaacggcaatcagaaagagctttgaaagcattgaaggaagctactaaggaagtgaaggtagaggatgagtaagagtagatattcacggaaaaagagcgtgaaaaagaagaaaaatccgttcattcttcttctgatttttttggtggggcttgccgttgcgatgtatcccttggtgtctcgttattattatcgtattgagtcaaacgaggttattaaagagtttgatgagacggtttcccagatggataaggcggaacttgaggagcgttggcgcttggctcaagccttcaatgcgaccttgaaaccatctgaaattcttgatccttttacagagcaagagaaaaagaaaggcgtctcagaatatgccaatatgctaaaggtccatgagcggattggctatgtggaaattcctgcgattgatcaggaaattccgatgtatgtcggaacgagtgaggaaattcttcagaagggcgcaggattgctagagggagcttcgttaccggttggtggtgaaaatacccacacagttgtcactgctcatagaggattaccgacggcagaactgtttagtcaattggataagatgaaaaaaggggatatcttttatcttcacgttttagatcaggtgttggcctaccaagtggatcagatagtgacggtggagccgaatgactttgagcctgtcttgattcaacatggggaagattatgcgaccttgttgacttgtacaccgtatatgattaacagtcatcgtctgttggtacgtgggaagcggattccgtatacggcaccaattgcagagcggaatcgagcggtgagagagcgtgggcaattctggttgtggttattactaggagcgatggcggtcatccttctcttgctgtatcgcgtgtatcgtaatcgacggattgtcaaaggactagaaaagcaattggaggggcgtcatgtcaaggactaaactacgagccttattgggatacttgttgatgttggtagcctgtttgattcctatttattgttttggacagatggtgttgcagtctcttggacaggtgaaaggtcatgctacatttgtgaaatccatgacaactgaaatgtaccaagaacaacagaaccattctctcgcctacaatcaacgcttggcttcgcaaaatcgcattgtagatccttttttggcggagggatatgaggtcaattaccaagtgtctgacgaccctgatgcagtctatggttacttgtctattccaagtttggaaatcatggagccggtttatttgggagcagattatcatcatttagggatgggcttggctcatgtggatggtacaccgctgcctctggatggtacagggattcgctcagtgattgctgggcaccgtgcagagccaagccatgtctttttccgccatttggatcagctaaaagttggagatgctctttattatgataatggccaggaaattgtagaatatcagatgatggacacagagattattttaccgtcggaatgggaaaaattagaatcggttagctctaaaaatatcatgaccttgataacctgcgatccgattcctacctttaataaacgcttattagtgaattttgaacgagtcgctgtttatcaaaaatcagatccacaaacagctgcagttgcgagggttgcttttacgaaagaaggacaatctgtatcgcgtgttgcaacctctcaatggttgtaccgtgggctagtggtactggcatttctgggaatcctgtttgttttgtggaagctagcacgtttactacgagggaaataaaaagaaatgaaaggaaagctaaggctgttcctttttccggctctttgtcaactgtag

SEQ ID NO: 503 - DNA, 11449 bp, S. pneumoniae
aagatactttctaatgagttgtttaggcgcttttcattataagtcttatgggacttttttgatactcaaaaagccctataatctccacagtgggatttacccactacagaaattatagagccagaaaaaacacttttgttcactagcagaaactagagagcagaagtgtttttctgttcagatttacccaaaactgggaaatatggggataagaatagagatggcttaggaagcccctttttgtgtgtagacagtacgatgaacttataacaaatagtgagcctttttagcaatcattgcgacccgtttgtcaaaagcctcttttcggatatctacaattgtctgatagatgagacgctgttggctaacatgcaaatctaaggcaatcgtcaaaaagtgatgtttccctttgggatactgctttttaacgtaaggcaggtattctttcgttgtaataataatcaatggctctgtcaaatgctcctctgaaggaggaggactaattagaatattgtatcctgtaacagaggcaactttgtcagtaaaattccgtaaaataatggactttattaagtttacatctgcttgattatttaaaatgataaaaatcgggatagcaggtagtgaggaaaagatggtttctgtcaagtagagtgagaaaaggtacagccgatgctggtcgataactccttcaatcttctgctcagtcatccactcttgaacaattgctttcgaaatatgatacagtggcttgtcgctttcaatcccataatgttcgtaataattataatagggaactagattttgtaaaccaaacaaaaacgttcttgttaagaaagtcagtgctgttaaaaaagaaagagaattcgaaatgtcatttcctaagatattcttgaacttggatagtagatgctttcctcttgtatgctgaagaatcagttgaatagtatgagtctttttttcttgattccatttgtccttggaaaacgaagaattagcagaacaataaaccaaaaagatataatccagttcttcctgagtaaaagtcatgttggcatgtggctctaagtaagtttggcaatgttccatcaaaatcggatacataaagaggttttttaatttttcaaactctttggactcagggaactcaagtggaaattcccgacgtttccaagtgagtgccactagtatgctaaaatgaacatactcgtcaggtgtgatttctaacagttcatgactgagttgagaattagactgcacaatcatatgtgtgacccaatccatacttccatcattcaaatcataaatctcaataccaaaatgaaactggaggagtgcaattaaaaaacgaatgcgatattcaggaccaactacttgatttttcacaaggtccaaacctactgaacgtagtaacaagccacacttttgtcgtacgcggtagcctgttgcgatggaaatatactctttttgtgtaaattcgttaaagctttgattaccttgtagtagaaagaagcggagtatttttaaaatagttgattggttataaagctgatggaagtaataattcgtttgatgagaatggtgttcgattaattgaacttgttgcgtatctaaattaaatgtcaactcttcctcgaatgtttcttgtaattcctgcaaaatgcttaggagacttttagattgtaatgaagttaaagtagacagttcatctagttcaatagaccgaatatccaataatatatttaaaatggtaattttatctgtaattcttttttcaatgtatttgtttagcatagttaccgaatcttagttgcatatagataattttaattattataatacaaaagaaactaattgtcttgtcaaaaaggttgtggaatttccgactttattgataaaacagcatgtaataaaaggcattttaaagatagtaatgagtattggtggagttttatggcttattttttttattagaaaatatttttttatcaaatattgtcgttctataaaaaaatatgtgataaaaatatctattgtgatggaagttgttttaatttatactaggatagttaatagtaatactatactatactatattgtatacaagtgtgtcattgccaggttgagaagatagctataacgcacttttatacgcttttgctacgtttgttagtgaacggattaactcagtgagataaattttatcagaacataagtaatccgtttcttcgtgtatacagattgaaagtacctatgaatcatagaaggattaacttgttctatgaataatgcttaacagggagacacacatgaaaaaagtaagaaagatatttcagaaggcagttgcaggactgtgctgtatatctcagttgacagctttttcttcgatagttgctttagcagaaacgcctgaaaccagtccagcgataggaaaagtagtgattaaggagacaggcgaaggaggagcgcttctaggagatgccgtctttgagttgaaaaacaatacggatggcacaactgtttcgcaaaggacagaggcgcaaacaggagaagcgatattttcaaacataaaacctgggacatacaccttgacagaagcccaacctccagttggttataaaccctctactaaacaatggactgttgaagttgagaagaatggtcggacgactgtccaaggtgaacaggtagaaaatcgagaagaggctctatctgaccagtatccacaaacagggacttatccagatgttcaaacaccttatcagattattaaggtagatggttcggaaaaaaacggacagcacaaggcgttgaatccgaatccatatgaacgtgtgattccagaaggtacactttcaaagagaatttatcaagtgaataatttggatgataaccaatatggaatcgaattgacggttagtgggaaaacagtgtatgaacaaaaagataagtctgtgccgctggatgtcgttatcttgctcgataactcaaatagtatgagtaacattcgaaacaagaatgctcgacgtgcggaaagagctggtgaggcgacacgttctcttattgataaaattacatctgattcagaaaatagggtagcgcttgtgacttatgcttccactatctttgatgggaccgagtttacagtagaaaaaggggtagcagataaaaacggaaagcgattgaatgattctcttttttggaattatgatcagacgagttttacaaccaataccaaagattatagttatttaaagctgactaatgataagaatgacattgtagaattaaaaaataaggtacctaccgaggcagaagaccatgatggaaatagattgatgtaccaattcggtgccacttttactcagaaagctttgatgaaggcagatgagattttgacacaacaagcgagacaaaatagtcaaaaagtcattttccatattacggatggtgtcccaactatgtcgtatccgattaattttaatcatgctacgtttgctccatcatatcaaaatcaactaaatgcattttttagtaaatctcctaataaagatggaatactattaagtgattttattacgcaagcaactagtggagaacatacaattgtacgcggagatgggcaaagttaccagatgtttacagataagacagtttatgaaaaaggtgctcctgcagctttcccagttaaacctgaaaaatattctgaaatgaaggcggctggttatgcagttataggcgatccaattaatggtggatatatttggcttaattggagagagagtattctggcttatccgtttaattctaatactgctaaaattaccaatcatggtgaccctacaagatggtactataacgggaatattgctcctgatgggtatgatgtctttacggtaggtattggtattaacggagatcctggtacggatgaagcaacggctactagttttatgcaaagtatttctagtaaacctgaaaactataccaatgttactgacacgacaaaaatattggaacagttgaatcgttatttccacaccatcgtaactgaaaagaaatcaattgagaatggtacgattacagatccgatgggtgagttaattgatttgcaattgggcacagatggaagatttgatccagcagattacactttaactgcaaacgatggtagtcgcttggagaatggacaagctgtaggtggtccacaaaatgatggtggtttgttaaaaaatgcaaaagtgctctatgatacgactgagaaaaggattcgtgtaacaggtctgtaccttggaacggatgaaaaagttacgttgacctacaatgttcgtttgaatgatgagtttgtaagcaataaattttatgataccaatggtcgaacaaccttacatcctaaggaagtagaacagaacacagtgcgcgacttcccgattcctaagattcgtgatgtgcggaagtatccagaaatcacaatttcaaaagagaaaaaacttggtgacattgagtttattaaggtcaataaaaatgataaaaaaccactgagaggtgcggtctttagtcttcaaaaacaacatccggattatccagatatttatggagctattgatcaaaatggcacttatcaaaatgtgagaacaggtgaagatggtaagttgacctttaaaaatctgtcagatgggaaatatcgattatttgaaaattctgaaccagctggttataaacccgttcaaaataagcctatcgttgccttccaaatagtaaatggagaagtcagagatgtgacttcaatcgttccacaagatataccagcgggttacgagtttacgaatgataagcactatattaccaatgaacctattcctccaaagagagaatatcctcgaactggtggtatcggaatgttgccattctatctgataggttgcatgatgatgggaggagttctattatacacacggaaacatccgtaaagtgtagaaatgataatatctatgttctgaacgatacttttaagaagtagcactcaagaagagatttaagtttacttggtgaaacctgttttattcgtaagtaaactatcattgaaaggggagatgttttcgaaaacttgcacagaaaaaggattattattgtcatgtgtaattcattacattgctcacagttgattttaagagatatgaataaggagaaatcatgaaatcaatcaacaaatttttaacaatgcttgctgccttattactgacagcgagtagcctgttttcagctgcaacagtttttgcggctgggacgacaacaacatctgttaccgttcataaactattggcaacagatggggatatggataaaattgcaaatgagttagaaacaggtaactatgctggtaataaagtgggtgttctacctgcaaatgcaaaagaaattgccggtgttatgttcgtttggacaaatactaataatgaaattattgatgaaaatggccaaactctaggagtgaatattgatccacaaacatttaaactctcaggggcaatgccggcaactgcaatgaaaaaattaacagaagctgaaggagctaaatttaacacggcaaatttaccagctgctaagtataaaatttatgaaattcacagtttatcaacttatgtcggtgaagatggagcaaccttaacaggttctaaagcagttccaattgaaattgaattaccattgaacgatgttgtggatgcgcatgtgtatccaaaaaatacagaagcaaagccaaaaattgataaagatttcaaaggtaaagcaaatccagatacaccacgtgtagataaagatacacctgtgaaccaccaagttggagatgttgtagagtacgaaattgttacaaaaattccagcacttgctaattatgcaacagcaaactggagcgatagaatgactgaaggtttggcattcaacaaaggtacagtgaaagtaactgttgatgatgttgcacttgaagcaggtgattatgctctaacagaagtagcaactggttttgatttgaaattaacagatgctggtttagctaaagtgaatgaccaaaacgctgaaaaaactgtgaaaatcacttattcggcaacattgaatgacaaagcaattgtagaagtaccagaatctaatgatgtaacatttaactatggtaataatccagatcacgggaatactccaaagccgaataagccaaatgaaaacggcgatttgacattgaccaagacatgggttgatgctacaggtgcaccaattccggctggagctgaagcaacgttcgatttggttaatgctcagactggtaaagttgtacaaactgtaactttgacaacagacaaaaatacagttactgttaacggattggataaaaatacagaatataaattcgttgaacgtagtataaaagggtattcagcagattatcaagaaatcactacagctggagaaattgctgtcaagaactggaaagacgaaaatccaaaaccacttgatccaacagagccaaaagttgttacatatggtaaaaagtttgtcaaagttaatgataaagataatcgtttagctggggcagaatttgtaattgcaaatgctgataatgctggtcaatatttagcacgtaaagcagataaagtgagtcaagaagagaagcagttggttgttacaacaaaggatgctttagatagagcagttgctgcttataacgctcttactgcacaacaacaaactcagcaagaaaaagagaaagttgacaaagctcaagctgcttataatgctgctgtgattgctgccaacaatgcatttgaatgggtggcagataaggacaatgaaaatgttgtgaaattagtttctgatgcacaaggtcgctttgaaattacaggccttcttgcaggtacatattacttagaagaaacaaaacagcctgctggttatgcattactaactagccgtcagaaatttgaagtcactgcaacttcttattcagcgactggacaaggcattgagtatactgctggttcaggtaaagatgacgctacaaaagtagtcaacaaaaaaatcactatcccacaaacgggtggtattggtacaattatctttgctgtagcgggggctgcgattatgggtattgcagtgtacgcatatgttaaaaacaacaaagatgaggatcaacttgcttaagtaagagagaaaggagccattgatgacaatgcagaaaatgcagaaaatgattagtcgtatcttctttgttatggctctgtgtttttctcttgtatggggtgcacatgcagtccaagcgcaagaagatcacacgttggtcttgcaattggagaactatcaggaggtggttagtcaattgccatctcgtgatggtcatcggttgcaagtatggaagttggatgattcgtattcctatgatgatcgggtgcaaattgtaagagacttgcattcgtgggatgagaataaactttcttctttcaaaaagacttcgtttgagatgaccttccttgagaatcagattgaagtatctcatattccaaatggtctttactatgttcgctctattatccagacggatgcggtttcttatccagctgaatttctttttgaaatgacagatcaaacggtagagcctttggtcattgtagcgaaaaaaacagatacaatgacaacaaaggtgaagctgataaaggtggatcaagaccacaatcgcttggagggtgtcggctttaaattggtatcagtagcaagagatgtttctgaaaaagaggttcccttgattggagaataccgttacagttcttctggtcaagtagggagaactctctatactgataaaaatggagagatttttgtgacaaatcttcctcttgggaactatcgtttcaaggaggtggagccactggcaggctatgctgttacgacgctggatacggatgtccagctggtagatcatcagctggtgacgattacggttgtcaatcagaaattaccacgtggcaatgttgactttatgaaggtggatggtcggaccaatacctctcttcaaggggcaatgttcaaagtcatgaaagaagaaagcggacactatactcctgttcttcaaaatggtaaggaagtagttgtaacatcagggaaagatggtcgtttccgagtggaaggtctagagtatgggacatactatttatgggagctccaagctccaactggttatgttcaattaacatcgcctgtttcctttacaatcgggaaagatactcgtaaggaactggtaacagtggttaaaaataacaagcgaccacggattgatgtgccagatacaggggaagaaaccttgtatatcttgatgcttgttgccattttgttgtttggtagtggttattatcttacgaaaaaaccaaataactgatattcaatgtacatcattatgaaaaagatagcaggctgaagggaagaccagagtactctgaggtgatgttaatcaggaatcatggtgatgtggcatgaatcacaataacggatatgaggctgggcagattgtgccagcctcattgtgggttattgtttgtaaaacgataggactggtctggtaatcattttaggaatggacaggactgggattctgatttaaaatggatggtgaatcagaaagaaatgagattttctcgtttctcttagcagataggattgtctgttaggaaaagcgataaaatgatgagtttgaagataaagggatgctgataaaaatggtaaaaacaaaaaagcaaaaacgaaataatctcctattaggagtggtatttttcattggaatggcggtaatggcgtatccgctggtgtctcgcttgtattatcgagtggaatcaaatcaacaaattgctgactttgataaggaaaaagcaacgttggatgaggctgacattgatgaacgaatgaaattggcacaagccttcaatgactctttgaataatgtagtgagtggcgatccttggtcggaagaaatgaagaaaaaagggcgagcagagtatgcacgtatgttagaaatccatgagcggatggggcatgtggaaatccccgttattgacgtggatttgccggtttatgctggtactgctgaagaggtattgcagcaaggggctgggcatctagagggaacttctctgccgatcggaggcaattcgacccatgcggtgattacggcacatacaggtttgccaacagctaagatgtttacggatttgaccaaacttaaagttggggataagttttatgtgcacaatatcaaggaagtgatggcctatcaagtggatcaagtaaaggtgattgagccgacgaactttgatgatttattgattgtaccaggtcatgattatgtgaccttgctgacttgtacgccatacatgatcaatacccatcgtctattggttcgggggcatcggataccgtacgtagcagaggttgaggaagaatttattgcagcaaacaaactcagtcatctctatcgctacctgttttatgtggcagttggtttgattgtgattcttttatggattattcgacgcttgcgcaagaagaaaaaacaaccggaaaaggctttgaaggcgctgaaagcagcaaggaaggaagtgaaggtggaggatggacaacagtagacgttcacgaaaaaaaggcacaaaaaagaagaaacatccgctgatccttcttctgattttcttagtaggattcgccgttgcgatatatccattggtgtctcgttattattatcgtattgagtcaaacgaggttattaaagagtttgatgagacggtttcccagatggataaggcagaacttgaggagcgttggcgcttggctcaagccttcaatgcgaccttgaaaccatctgaaattcttgatccttttacagagcaagagaaaaagaaaggcgtctcagaatatgccaatatgctaaaggtccatgagcggattggctatgtggaaattcctgcgattgatcaggaaattccgatgtatgtcggaacgagtgaggacattcttcagaaaggggcagggctgttagaaggggcttcgctgcctgttggaggtgaaaatacccatacagtgatcactgctcacagaggattgccaacggcagaattgttcagtcaattggataagatgaaaaaaggggatatcttttatcttcacgttttagatcaggtgttggcctaccaagtggatcagatagtgacggtggagccgaatgactttgagcctgtcttgattcaacatggggaagattatgcgaccttgttgacttgtacaccgtatatgattaacagtcatcgtctgttggtacgtgggaagcggattccgtatacggcaccaattgcagagcggaatcgagcggtgagagagcgtgggcaattctggttgtggttattactaggagcgatggcggtcatccttctcttgctgtatcgcgtgtatcgtaatcgacggattgtcaaaggactagaaaagcaattggaggggcgtcatgtcaaggactaaactacgagccttattgggatacttgttgatgttggtagcctgtttgattcctatttattgttttggacagatggtgttgcagtctcttggacaggtgaaaggtcatgctacatttgtgaaatccatgacaactgaaatgtaccaagaacaacagaaccattctctcgcctacaatcaacgcttggcttcgcaaaatcgcattgtagatccttttttggcggagggatatgaggtcaattaccaagtgtctgacgaccctgatgcagtctatggttacttgtctattccaagtttggaaatcatggagccggtttatttgggagcagattatcatcatttagggatgggcttggctcatgtggatggtacaccgctgcctctggatggtacagggattcgctcagtgattgctgggcaccgtgcagagccaagccatgtctttttccgccatttggatcagctaaaagttggagatgctctttattatgataatggccaggaaattgtagaatatcagatgatggacacagagattattttaccgtcggaatgggaaaaattagaatcggttagctctaaaaatatcatgaccttgataacctgcgatccgattcctacctttaataaacgcttattagtgaattttgaacgagtcgctgtttatcaaaaatcagatccacaaacagctgcagttgcgagggttgcttttacgaaagaaggacaatctgtatcgcgtgttgcaacctctcaatggttgtaccgtgggctagtggtactggcatttctgggaatcctgtttgttttgtggaagctagcacgtttactacgagggaaataaaaagaaatgaaaggaaagctaaggctgttcctttttccggctctttgtcaactgtagtgggttgaaaaaaag

SEQ ID NO: 504 - DNA, 11369 bp, S. pneumoniae
tacagttgacaaagagccggaaaaaggaacagccttagctttcctttcatttctttttatttccctcgtagtaaacgtgctagcttccacaaaacaaacaggattcccagaaatgccagtaccactagcccacggtacaaccattgagaggttgcaacacgcgatacagattgtccttctttcgtaaaagcaaccctcgcaactgcagctgtttgtggatctgatttttgataaacagcgactcgttcaaaattcactaataagcgtttattaaaggtaggaatcggatcgcaggttatcaaggtcatgatatttttagagctaaccgattctaatttttcccattccgacggtaaaataatctctgtgtccatcatctgatattctacaatttcctggccattatcataataaagagcatctccaacttttagctgatccaaatggcggaaaaagacatggcttggttctgcacggtgcccagcaatcactgaacgaatcccttttccctcaacaggaagaggcgtcccatccacatgggccaaccccattgctaaatgatggtaatccgctcctagataaactggctccatgatttccaaactcggaatcgacaaatagccgtagactgcatcaggatcgtcagacacttggtaatttacctcatacccttccgccaaaaaaggatctacaatacgattttgcgaatccaagcgttgattgtaatcaagcgaccgttgcaattgctcttggtaactgtcggccgtcacagattctgaaaatatctcatgaccttttacttgtcctaaagactgtaacaccatctgcccaaaacaataaacaggaatcaccaatgctaccagcatcagcaaataccctagtaatttctgtagcttagcctttgacatgatgctcctccaattgtttttctagccctttgacaatgcgacgatgacgatacaccccgtaactcaataccagaatcataaccaacgccgctagcaataaccacaaccagaattgcccacgctctctcaccgctcgatttcgctctgcaattggtgccgtatacggaatccgcttcccacgtaccaacagacgatgactgttaatcatatacggtgtacaggtcaacaaggtcgcataatctttcccatgttgaatcaagacaggctcaaagtcatttggctcaaccgtcaaaatctgatccacttggtaggccaacacctggtctaaaacgtgaagataaaagacatccccttttttcatcttatccaattgactaaacagttctgccgtcggtaatcctctatgagcagtaacaactgtgtgggtattttcaccaccaaccggtaacgaagctccctctagcaatcctgcgcccttctgaagaatttcctcactcgttccgacatacatcggaatttcctgatcaatcgcaggaatttccacatagccaatccgctcatggacctttagcatattggcatattctgagacgcctttctttttctcttgctctgtaaaaggatcaagaatttcagatggtttcaaggtcgcattgaaggcttgagccaagcgccaacgctcctcaagttctgccttatccatctgggaaaccgtctcatcaaactctttaataacctcgtttgactcaatacgataataataacgagacaccaatggatatatcgcaacggcgaatcctactaagaaaatcagaagaaggatcagcggatgtttcttcttttttgtgcctttttttcgtgaacgtctactgttgtccatcctccaccttcacttccttccttgctgctttcagcgccttcaaagccttttccggttgttttttcttcttgcgcaagcgtcgaataatccataaaagaatcacaatcaaaccaactgccacataaaacaggtagcgatagagatgactgagtttgtttgctgcaataaattcttcctcaacctctgctacgtacggtatccgatgcccccgaaccaatagacgatgggtattgatcatgtatggcgtacaagtcagcaaggtcacataatcatgacctggtacaatcaataaatcatcaaagttcgtcggctcaatcacctttacttgatccacttgataggccatcacttccttgatattgtgcacataaaacttatccccaactttaagtttggtcaaatccgtaaacatcttagctgttggcaaacctgtatgtgccgtaatcaccgcatgggtcgaattgcctccgatcggcagagaagttccctctagctgcccagccccttgctgcaatacctcttcagcagtaccagcataaaccggcaaatccacgtcaataacggggatttccacatgccccatccgctcatggatttctaacatacgtgcatactctgctcgcccttttttcttcatttcttccgaccaaggatcgccactcactacattattcaaagagtcattgaaggcttgtgccaatttcattcgttcatcaatgtcagcctcatccaacgttgctttttccttatcaaagtcagcaatttgttgatttgattccactcgataatacaagcgagacaccagcggatacgccattaccgccattccaatgaaaaataccactcctaataggagattatttcgtttttgcttttttgtttttaccatttttatcagcatccctttatcttcaaactcatcattttatcgcttttcctaacagacaatcctatctgctaagagaaacgagaaaatctcatttctttctgattcaccatccattttaaatcagaatcccagtcctgtccattcctaaaatgattaccagaccagtcctatcgttttacaaacaataacccacaatgaggctggcacaatctgcccagcctcatatccgttattgtgattcatgccaaatcaccatgattcctgattaacatcacctcagagtactctggtcttcccttcagcctgctatctttttcataatgatgtacattgaatatcagttatttgtttttttcgtaagataatagccactaccaaacaacaaaatggcaacaagcatcaagatatacaaggtttcttcccctgtatctggcacatcaatccgtggtcgcttgttatttttaaccactgttaccagttccttacgagtatctttcccgattgtaaaggaaacaggcgatgttaattgaacataaccagttggagcttggagctcccataaatagtatgtcccatactctagaccttccactcggaaacgaccatctttccctgatgccacaactacttccttaccattttgaagaacaggagtatagtgtccgttttcttctttcatgactttgaacattgccccttgaagagaggtattggtccgaccatccaccttcataaagtcaacattgccacgtggtaatttctgattgacaaccgtaatcgtcaccagctgatgatctaccaactggacatccgtatccatcgtcgtaacagtatagcctgccagtggctccacctccttgaaacgataggtcccaagaggaagatttgtcacaacaatctctccatttttatcagtatagagagttctccctacttgaccagaagaactgtaacggtattctccaatcaagggaacctctttttcagaaccatctcttgctactgataccaatttaaagccgacaccctccaagcgattgtggtcttgatccacctttatcagcttcacctttgttgtcaccgtatctgcttttttcgctacaatgaccaaaggctctaccgtctgatctgtcatttcaaaaagaaattcagctggataagaaaccgcatccgtctggataatagagcgaacatagtaaagaccatttggaatatgagatacttcaatctgattctcaaggaaggtcatctcaaacgaagtctttttgaaagaagaaagtttattctcatcccacgaatgcaagtctctcacaatttgcacccgattatcataggaatacgaatcatccaacttccatacctgcaaccgatgaccatcacgagatggcaattgactaaccacctcctgatagttctccaattgcaagaccaacgtgtgatcttcttgcgcttggactgcatgtgcaccccatacaagagaaaaacacagagccataacaaagaagatacgactaatcattttctgcattttctgcattgtcatcaatggctcctttctctcttacttaagcaagttgatcctcatctttgttgtttttaacatatgcgtacactgcaatacccataatcacagcccccgctacagcaaagataattgtaccaataccacccgtttgagggatcgtgatttttttgttgactacttttgtagcgtcgttcttctgaacatcttttaaataattgaaatcaccttgattccaagaacctgctccaacctcaaacttcacatctccaagttttgcaaagccttctggagcttttgtttcttccaacgtgtagcttccagcagcaagacctgaaatttggaattgaccatcagtgttagaagtaagaactaacgcatcttcttttctctctacttctacatagccaaatctagctgctctgtaattgtcattatatgttttttgcgcagcatctactacagcttgtgctgcatttttatctgcagcatttgtataggctgctatcgctgcatctagcgcttgtttcgcttctgcggcagctttctcatttacagcttgttgtgctgcagatttgagtgcaagatatttcccttgctcattcttcacaacgaattgtgcttcttttaagcgttcgtctttttggtcaaccttaacgaattttttaccatatgtttttacacgtggctcttcaggatttattggttctggattttcatctttccagtttttaacagcaatttttcctgtttcagtaattgtttggtaatctgcagaatatcccttaattgtccgttcaacaaatttatattctgtattattatcaagacctgtagcagtaaatgtccaattatttgtttgattcaatacaatacctgtttcatgtccaggtactttaacgacctcacctgtctgagcatttaccaaatcaaaagttacttctacacctgctataggagcatctttagcatcagcccatgttttagtaattgtaagttcaccgtttttaggtttgtttggttttggagtgttaccatgacctgggttgtttccataatggaatgttacatcattcgcttctggcacatcagcaacagcaagagcatttaaagttgcagtatacttcaacgtaattgttgcttctgcatctttaccgttgattgcttccagacctttttcatttaacttcaagataaagccattatgacctgcttctaatgtgtaatgagaattatcaagcggttgaccattataattaacaactacatcaccattataatctagaccttctgtcatttcatctgaccagaaagctgttgcaagagttgagtttttcggaatagttgttgtaacaatatacggtaccttagtgccaattgctaaacctttttcacctggatctacgaaacctgctgcagtatcaaatgttttcgttgctgtaggtttgtcttcagaattctttggatagacatgtgcattttctacaacaccattttggtttacaagcggcagagtaattaaagcaggaacagctttcatacctgttaaaactttaccatttggaccgacataagtcgattctttacgtacttcgacaagacgatatgtcccttgtaaaacttcagtatcaaatttaacacctgtttcagtcgtcacacctttattaaccgcagtccaaaccgcatcattcgttaaattttcttgttcttttccttgaggacccgtataactctgtaactcgaatgcaacaccagagatttcggttactccttgtggaacaccttgaagttgtttgaactgttcaaaattttgcgaaccgtcataacctgcagtagtaatcgcatcagaattccaagcgtcaagctcttgatctgtcatcaataatttatgaactgtaagtgtcttagttttttgttccgccgcaaaaactgttgcagctgagaacaggctactcactgtcagtaataaggcagcaagtattgttaaaaatttgttgattgatttcatgatttctccttattcatatctcttaaaatcaactgtgagcaatgtaatgaattacacatgacaataataatcctttttctgtgcaagttttcgaaaacatctcccctttcaatgatagtttacttacgaataaaacaggtttcaccaagtaaacttaaatctcttcttgagtgctacttcttaaaagtatcgttcagaacatagatattatcatttctacactttacggatgtttccgtgtgtataatagaactcctcccatcatcatgcaacctatcagatagaatggcaacattccgataccaccagttcgaggatattctctctttggaggaataggttcattggtaatatagtgcttatcattcgtaaactcgtaacccgctggtatatcttgtggaacgattgaagtcacatctctgacttctccatttactatttggaaggcaacgataggcttattttgaacgggtttataaccagctggttcagaattttcaaataatcgatatttcccatctgacagatttttaaaggtcaacttaccatcttcacctgttctcacattttgataagtgccattttgatcaatagctccataaatatctggataatccggatgttgtttttgaagactaaagaccgcatctctcagtggttttttatcatttttattgaccttaataaactcaatgtcaccaagttttttctcttttgaaattgtgatttctggatacttccgcacatcacgaatcttaggaatcgggaagtcgcgcactgtgttctgttctacttccttaggatgtaaggttgttcgaccattggtatcataaaatttattgcttacaaactcatcattcaaacgaacattgtaggtcaacgtaactttttcatccgttccaaggtacagacctgttacacgaatccttttctcagtcgtatcatagagcacttttgcattttttaacaaaccaccatcattttgtggaccacctacagcttgtccattctccaagcgactaccatcgtttgcagttaaagtgtaatctgctggatcaaatcttccatctgtgcccaattgcaaatcaattaactcacccatcggatctgtaatcgtaccattctcaattgatttcttttcagttacgatggtgtggaaataacgattcaactgttccaatatttttgtcgtgtcagtaacattggtatagttttcaggtttactagaaatactttgcataaaactagtagccgttgcttcatccgtaccaggatctccgttaataccaatacctaccgtaaagacatcatacccatcaggagcaatattcccgttatagtaccatcttgtagggtcaccatgattggtaattttagcagtattagaattaaacggataagccagaatactctctctccaattaagccaaatatatccaccattaattggatcgcctataactgcataaccagccgccttcatttcagaatatttttcaggtttaactgggaaagctgcaggagcacctttttcataaactgtcttatctgtaaacatctggtaactttgcccatctccgcgtacaattgtatgttctccactagttgcttgcgtaataaaatcacttaatagtattccatctttattaggagatttactaaaaaatgcatttagttgattttgatatgatggagcaaacgtagcatgattaaaattaatcggatacgacatagttgggacaccatccgtaatatggaaaatgactttttgactattttgtctcgcttgttgtgtcaaaatctcatctgccttcatcaaagctttctgagtaaaagtggcaccgaattggtacatcaatctatttccatcatggtcttctgcctcggtaggtaccttattttttaattctacaatgtcattcttatcattagtcagctttaaataactataatctttggtattggttgtaaaactcgtctgatcataattccaaaaaagagaatcattcaatcgttttccgtttttatctgctacccctttttctactgtaaactcggtcccatcaaagatagtggaagcataagtcacaagcgctaccctattttctggatcagatgtaattttatcaataagagaacgtgtcgcctcaccagctctttccgcacgtcgagcattcttgtttcgaatgttactcatactatttgagttatcgagcaagataacgacatccagcggcacagacttatctttttgttcatacactgttttcccactaaccgtcaattcgattccatattggttatcatccaaattattcacttgataaattctctttgaaagtgtaccttctggaatcacacgttcatatggattcggattcaacgccttgtgctgtccgtttttttccgaaccatctaccttaataatctgataaggtgtttgaacatctggataagtccctgtttgtggatactggtcagatagagcctcttctcgattttctacctgttcaccttggacagtcgtccgaccattcttctcaacttcaacagtccattgtttagtagagggtttataaccaactggaggttgggcttctgtcaaggtgtatgtcccaggttttatgtttgaaaatatcgcttctcctgtttgcgcctctgtcctttgcgaaacagttgtgccatccgtattgtttttcaactcaaagacggcatctcctagaagcgctcctccttcgcctgtctccttaatcactacttttcctatcgctggactggtttcaggcgtttctgctaaagcaactatcgaagaaaaagctgtcaactgagatatacagcacagtcctgcaactgccttctgaaatatctttcttacttttttcatgtgtgtctccctgttaagcattattcatagaacaagttaatccttctatgattcataggtactttcaatctgtatacacgaagaaacggattacttatgttctgataaaatttatctcactgagttaatccgttcactaacaaacgtagcaaaagcgtataaaagtgcgttatagctatcttctcaacctggcaatgacacacttgtatacaatatagtatagtattactattaactatcctagtataaattaaaacaacttccatcacaatagatatttttatcacatatttttttatagaacgacaatatttgataaaaaaatattttctaataaaaaaaataagccataaaactccaccaatactcattactatctttaaaatgccttttattacatgctgttttatcaataaagtcggaaattccacaacctttttgacaagacaattagtttcttttgtattataataattaaaattatctatatgcaactaagattcggtaactatgctaaacaaatacattgaaaaaagaattacagataaaattaccattttaaatatattattggatattcggtctattgaactagatgaactgtctactttaacttcattacaatctaaaagtctcctaagcattttgcaggaattacaagaaacattcgaggaagagttgacatttaatttagatacgcaacaagttcaattaatcgaacaccattctcatcaaacgaattattacttccatcagctttataaccaatcaactattttaaaaatactccgcttctttctactacaaggtaatcaaagctttaacgaatttacacaaaaagagtatatttccatcgcaacaggctaccgcgtacgacaaaagtgtggcttgttactacgttcagtaggtttggaccttgtgaaaaatcaagtagttggtcctgaatatcgcattcgttttttaattgcactcctccagtttcattttggtattgagatttatgatttgaatgatggaagtatggattgggtcacacatatgattgtgcagtctaattctcaactcagtcatgaactgttagaaatcacacctgacgagtatgttcattttagcatactagtggcactcacttggaaacgtcgggaatttccacttgagttccctgagtccaaagagtttgaaaaattaaaaaacctctttatgtatccgattttgatggaacattgccaaacttacttagagccacatgccaacatgacttttactcaggaagaactggattatatctttttggtttattgttctgctaattcttcgttttccaaggacaaatggaatcaagaaaaaaagactcatactattcaactgattcttcagcatacaagaggaaagcatctactatccaagttcaagaatatcttaggaaatgacatttcgaattctctttcttttttaacagcactgactttcttaacaagaacgtttttgtttggtttacaaaatctagttccctattataattattacgaacattatgggattgaaagcgacaagccactgtatcatatttcgaaagcaattgttcaagagtggatgactgagcagaagattgaaggagttatcgaccagcatcggctgtaccttttctcactctacttgacagaaaccatcttttcctcactacctgctatcccgatttttatcattttaaataatcaagcagatgtaaacttaataaagtccattattttacggaattttactgacaaagttgcctctgttacaggatacaatattctaattagtcctcctccttcagaggagcatttgacagagccattgattattattacaacgaaagaatacctgccttacgttaaaaagcagtatcccaaagggaaacatcactttttgacgattgccttagatttgcatgttagccaacagcgtctcatctatcagacaattgtagatatccgaaaagaggcttttgacaaacgggtcgcaatgattgctaaaaaggctcactatttgttataagttcatcgtactgtctacacacaaaaaggggcttcctaagccatctctattcttatccccatatttcccagttttgggtaaatctgaacagaaaaacacttctgctctctagtttctgctagtgaacaaaagtgttttttctggctctataatttctgtagtgggtaaatcccactgtggagattatagggctttttgagtatcaaaaaagtcccataagacttataatgaaaagcgc

SEQ ID NO: 505 - DNA, 383 bp, S. agalactiae
ttgatagaccgccttcattatcatttctagaatttttctttaggtttgtaaagactacaaaataaaatgatgaaaacaactatcttgtggatacactaaaaagacacgctaattagcaaactctctcttcatcatctctcaccattattatactactatttatatgacaaataaaggtgattttgttaaaatataactttgaaaatccacatatatttttaatcttccgtctgaaaaaataaataaaaatagtaaaaataaacacgaatttaaaataagcaaattttttaagaaaatctgtgctaaactttaatagttttgtgcttaataataatcagcacttacaaagaacaaagggaaaagcgaggagagaacttttaatg

SEQ ID NO: 506 - DNA, 35 bp, S. agalactiae
agtcagtctctagacggcacaataggagttgtaaa

SEQ ID NO: 507 - DNA, 37 bp, S. agalactiae
cacctgtcatagatcttaagaatactaaagcgcataa

SEQ ID NO: 508 - DNA, 36 bp, S. agalactiae
agtcagtccttaagccgcatattattaatcatgttg

SEQ ID NO: 509 - DNA, 35 bp, S. agalactiae
agtcagtcctcgagttaaacttcctctgattgacg

SEQ ID NO: 510 - DNA, 34 bp, S. agalactiae
agtcagtccttaagaaggagtggtgctgcggtaa

SEQ ID NO: 511 - DNA, 35 bp, S. agalactiae
agtcagtcctcgagttaagcttcctctgattgacg

SEQ ID NO: 512 - DNA, 24 bp, S. agalactiae
ctagtgatatatctagagaaaaag

SEQ ID NO: 513 - DNA, 39 bp, S. agalactiae
ctagctagtcgcgactttttcatttttgatttccctttc

SEQ ID NO: 514 - protein, 1309 aa, S. agalactiae
MRKYQKFSKILTLSLFCLSQIPLNTNVLGESTVPENGAKGKLVVKKTDDQNKPLSKATFVLKTTAHPESKIEKVTAELTGEATFDNLIPGDYTLSEETAPEGYKKTNQTWQVKVESNGKTTIQNSGDKNSTIGQNQEELDKQYPPTGIYEDTKESYKLEHVKGSVPNGKSEAKAVNPYSSEGEHIREIPEGTLSKRISEVGDLAHNKYKIELTVSGKTIVKPVDKQKPLETDTTWTARTVSEVKADLVKQDNKSSYTVKYGDTLSVISEAMSIDMNVLAKINNIADINLIYPETTLTVTYDQKSHTATSMKIETPATNAAGQTTATVDLKTNQVSVADQKVSLNTISEGMTPEAATTIVSPMKTYSSAPALKSKEVLAQEQAVSQAAANEQVSPAPVKSITSEVPAAKEEVKPTQTSVSQSTTVSPASVAAETPAPVAKVAPVRTVAAPRVASVKVVTPKVETGASPEHVSAPAVPVTTTSPATDSKLQATEVKSVPVAQKAPTATPVAQPASTTNAVAAHPENAGLQPHVAAYKEKVASTYGVNEFSTYRAGDPGDHGKGLAVDFIVGTNQALGNKVAQYSTQNMAANNISYVIWQQKFYSNTNSIYGPANTWNAMPDRGGVTANHYDHVHVSFNKDVVFVLDNSNSMNNDGPNFQRHNKAKKAAEALGTAVKDILGANSDNRVALVTYGSDIFDGRSVDVVKGFKEDDKYYGLQTKFTIQTENYSHKQLTNNAEEIIKRIPTEAPKAKWGSTTNGLTPEQQKEYYLSKVGETFTMKAFMEADDILSQVNRNSQKIIVHVTDGVPTRSYAINNFKLGASYESQFEQMKKNGYLNKSNFLLTDKPDDIKGNGESYFLFPLDSYQTQIISGNLQKLHYLDLNLNYPKGTIYRNGPVKEHGTPTKLYINSLKQKNYDIFNFGIDISGFRQVYNEEYKKNQDGTFQKLKEEAFKLSDGEITELMRSFSSKPEYYTPIVTSADTSNNEILSKIQQQFETILTKENSIVNGTIEDPMGDKINLQLGNGQILQPSDYTLQGNDGSVMKDGIATGGPNNDGGILKGVKLEYIGNKLYVRGLNLGEGQKVTLTYDVKLDDSFISNKFYDTNGRTTLNPKSEDPNTLRDFPIPKIRDVREYPTITIKNEKKLGEIEFIKVDKDNNKLLLKGATFELQEFNEDYKLYLPIKNNNSKVVTGENGKISYKDLKDGKYQLIEAVSPEDYQKITNKPILTFEVVKGSIKNIIAVNKQISEYHEEGDKHLITNTHIPPKGIIPKTGGKGILSFILIGGAMMSIAGGIYIWKRYKKSSDMSIKKD

SEQ ID NO: 515 - protein, 1095 aa, S. agalactiae
MRKYQKFSKILTLSLFCLSQIPLNTNVLGESTVPENGAKGKLVVKKTDDQNKPLSKATFVLKTTAHPESKIEKVTAELTGEATFDNLIPGDYTLSEETAPEGYKKTNQTWQVKVESNGKTTIQNSGDKNSTIGQNQEELDKQYPPTGIYEDTKESYKLEHVKGSVPNGKSEAKAVNPYSSEGEHIREIPEGTLSKRISEVGDLAHNKYKIELTVSGKTIVKPVDKQKPLETDTTWTARTVSEVKADLVKQDNKSSYTVKYGDTLSVISEAMSIDMNVLAKINNIADINLIYPETTLTVTYDQKSHTATSMKIETPATNAAGQTTATVDLKTNQVSVADQKVSLNTISEGMTPEAATTIVSPMKTYSSAPALKSKEVLAQEQAVSQAAANEQVSPAPVKSITSEVPAAKEEVKPTQTSVSQSTTVSPASVAAETPAPVAKVAPVRTVAAPRVASVKVVTPKVETGASPEHVSAPAVPVTTTSPATDSKLQATEVKSVPVAQKAPTATPVAQPASTTNAVAAHPENAGLQPHVAAYKEKVASTYGVNEFSTYRAGDPGDHGKGLAVDFIVGTNQALGNKVAQYSTQNMAANNISYVIWQQKFYSNTNSIYGPANTWNAMPDRGGVTANHYDHVHVSFNKGESYFLFPLDSYQTQIISGNLQKLHYLDLNLNYPKGTIYRNGPVKEHGTPTKLYINSLKQKNYDIFNFGIDISGFRQVYNEEYKKNQDGTFQKLKEEAFKLSDGEITELMRSFSSKPEYYTPIVTSADTSNNEILSKIQQQFETILTKENSIVNGTIEDPMGDKINLQLGNGQILQPSDYTLQGNDGSVMKDGIATGGPNNDGGILKGVKLEYIGNKLYVRGLNLGEGQKVTLTYDVKLDDSFISNKFYDTNGRTTLNPKSEDPNTLRDFPIPKIRDVREYPTITIKNEKKLGEIEFIKVDKDNNKLLLKGATFELQEFNEDYKLYLPIKNNNSKVVTGENGKISYKDLKDGKYQLIEAVSPEDYQKITNKPILTFEVVKGSIKNIIAVNKQISEYHEEGDKHLITNTHIPPKGIIPKTGGKGILSFILIGGAMMSIAGGIYIWKRYKKSSDMSIKKD

SEQ ID NO: 516 - DNA, 35 bp, S. agalactiae; identical to SEQ ID NO: 506

SEQ ID NO: 517 - DNA, 40 bp, S. agalactiae
ccacgtcgtatctgtttctaacggcttttgtttgtccact

SEQ ID NO: 518 - DNA, 40 bp, S. agalactiae
gacaaacaaaagccgttagaaacagatacgacgtggacag

SEQ ID NO: 519 - DNA, 40 bp, S. agalactiae
gagtacgaagacaacatctttgttaaatgatacgtgaacg

SEQ ID NO: 520 - DNA, 40 bp, S. agalactiae
taaaaagtaactctcccctttgttaaatgatacgtgaacg

SEQ ID NO: 521 - DNA, 39 bp, S. agalactiae
cacgtatcatttaacaaagatgttgtcttcgtactcgat

SEQ ID NO: 522 - DNA, 41 bp, S. agalactiae
cacgtatcatttaacaaaggggagagttactttttatttcc

SEQ ID NO: 523 - DNA, 37 bp, S. agalactiae; identical to SEQ ID NO: 507

SEQ ID NO: 524 - protein, 711 aa, S. agalactiae
MKMNKKVLLTSTMAASLLSVASVQAQETDTTWTARTVSEVKADLVKQDNKSSYTVKYGDTLSVISEAMSIDMNVLAKINNIADINLIYPETTLTVTYDQKSHTATSMKIETPATNAAGQTTATVDLKTNQVSVADQKVSLNTISEGMTPEAATTIVSPMKTYSSAPALKSKEVLAQEQAVSQAAANEQVSPAPVKSITSEVPAAKEEVKPTQTSVSQSTTVSPASVAAETPAPVAKVAPVRTVAAPRVASVKVVTPKVETGASPEHVSAPAVPVTTTSPATDSKLQATEVKSVPVAQKAPTATPVAQPASTTNAVAAHPENAGLQPHVAAYKEKVASTYGVNEFSTYRAGDPGDHGKGLAVDFIVGTNQALGNKVAQYSTQNMAANNISYVIWQQKFYSNTNSIYGPANTWNAMPDRGGVTANHYDHVHVSFNKHQLTIVHLEARDIDRPNPQLEIAPKEGTPIEGVLYQLYQLKSTEDGDLLAHWNSLTITELKKQAQQVFEATTNQQGKATFNQLPDGIYYGLAVKAGEKNRNVSAFLVDLSEDKVIYPKIIWSTGELDLLKVGVDGDTKKPLAGVVFELYEKNGRTPIRVKNGVHSQDIDAAKHLETDSSGHIRISGLIHGDYVLKEIETQSGYQIGQAETAVTIEKSKTVTVTIENKKVPTPKVPSRGGLIPKTGEQQAMALVIIGGILIALALRLLSKHRKHQNKD

SEQ ID NO: 525 - protein, 637 aa, S. agalactiae
MKMNKKVLLTSTMAASLLSVASVQAQETDTTWTARTVSEVKADLVKQDNKSSYTVKYGDTLSVISEAMSIDMNVLAKINNIADINLIYPETTLTVTYDQKSHTATSMKIETPATNAAGQTTATVDLKTNQVSVADQKVSLNTISEGMTPEAATTIVSPMKTYSSAPALKSKEVLAQEQAVSQAAANEQVSPAPVKSITSEVPAAKEEVKPTQTSVSQSTTVSPASVAAETPAPVAKVAPVRTVAAPRVASVKVVTPKVETGASPEHVSAPAVPVTTTSPATDSKLQATEVKSVPVAQKAPTATPVAQPASTTNAVAAHPENAGLQPHVAAYKEKVASTYGVNEFSTYRAGDPGDHGKGLAVDFIVGTNQALGNKVAQYSTQNMAANNISYVIWQQKFYSNTNSIYGPANTWNAMPDRGGVTANHYDHVHVSFNKQGKATFNQLPDGIYYGLAVKAGEKNRNVSAFLVDLSEDKVIYPKIIWSTGELDLLKVGVDGDTKKPLAGVVFELYEKNGRTPIRVKNGVHSQDIDAAKHLETDSSGHIRISGLIHGDYVLKEIETQSGYQIGQAETAVTIEKSKTVTVTIENKKVPTPKVPSRGGLIPKTGEQQAMALVIIGGILIALALRLLSKHRKHQNKD

SEQ ID NO: 526 - protein, 6 aa, S. pyogenes
VVPTGV

SEQ ID NO: 527 - protein, 6 aa, S. pyogenes
EFPTGV

SEQ ID NO: 528 - protein, 6 aa, S. pyogenes
LPSTGE

SEQ ID NO: 529 - protein, 6 aa, S. pyogenes
VPPTGL

SEQ ID NO: 530 - protein, 6 aa, S. pyogenes
QVPTGV

SEQ ID NO: 531 - protein, 6 aa, S. pyogenes
LPLAGE

SEQ ID NO: 532 - protein, 6 aa, S. pyogenes
LPATGE

SEQ ID NO: 533 - protein, 6 aa, S. pyogenes
LPATGD

SEQ ID NO: 534 - protein, 6 aa, S. pyogenes
VPPTGF

SEQ ID NO: 535 - protein, 10 aa, S. pyogenes
LSLAQVPTGV

SEQ ID NO: 536 - protein, 6 aa, S. pyogenes
LPLAGE

SEQ ID NO: 537 - protein, 6 aa, S. pyogenes
LPATGE

SEQ ID NO: 538 - protein, 6 aa, S. pyogenes
LPATGD

SEQ ID NO: 539 - protein, 6 aa, S. pyogenes
LPSSGG

SEQ ID NO: 540 - protein, 6 aa, S. pyogenes
LPSTGS

SEQ ID NO: 541 - protein, 5 aa, S. pyogenes
  VARIANT (1)...(5): Xaa = Any Amino Acid
LPXSG

SEQ ID NO: 542 - protein, 5 aa, S. pyogenes
  VARIANT (1)...(5): Xaa = Any Amino Acid
VVXTG

SEQ ID NO: 543 - protein, 5 aa, S. pyogenes
  VARIANT (1)...(5): Xaa = Any Amino Acid
EVXTG

SEQ ID NO: 544 - protein, 5 aa, S. pyogenes
  VARIANT (1)...(5): Xaa = Any Amino Acid
VPXTG

SEQ ID NO: 545 - protein, 5 aa, S. pyogenes
  VARIANT (1)...(5): Xaa = Any Amino Acid
QVXTG

SEQ ID NO: 546 - protein, 5 aa, S. pyogenes
  VARIANT (1)...(5): Xaa = Any Amino Acid
LPXAG

SEQ ID NO: 547 - DNA, 14141 bp, S. agalactiae
gttgcttcataagttgtctgaaggcctaattctaaagtcacatgcattctttcagaaagttcagcgagatagtatatagtttcatcaggtaagcaatccggccttgttccgatgttgatctccgataactcctggctcattaatagcctgttcgtaacgctctttaattatctctaacttagcatgggtattggtaaaattttgaaaatagactaagtatttattaacctcgggccactttctatgcatgaaatcaatttctttatagaattgttcacgaataggagcttctggagcaactatagcatcccctgaaccagaaactgtgcaaaaagtgcatcctcctctagcaactgttccgtctctgttaggacagtcaaaaccagcatctataggtaatttaaatattttttctccaaagagttctcgataataatcattaatcgcacgataacgttttttcataggataattgtatcacaattttaactaaaataacctcactactacaataaaacttaaaaagattggaacgtcagttagtcccaatcttttatttacttcactttctttaaccaatccttggctaaaaagatatacgcagttagattcaaaataccataagcaagtataaaaccagctaaaacatctgtcggaaaatgaacccctaggtaaatacgagataacccaattaaaaaaatgagcaaacccaaataaagtaccttggcacaacagtttccatatactcttaggcatatagtactgcaataaaataataatactcccaaatatcataaatgttcccatcgagtgcccactgggaaacgaatagccacctgcaaatactaaatgggttaaagttggtcttactctttgaaaaataagttttaaagaaagtatacatataccagagataatagcatttactgcgataaatctagcttgaggataccacttcttaaggtaacagaaagtgacgctcataatcgcaatagctatctggcttacagtattaccaatcacagtgattaacttgaaaaatcttgtagaaagatttggcaactgtcctctaacactttcttgaatgttttggtcaaatgcaattacagtgtcgggccaatatttgatgaccaatcctaaactgaaaaataagataatagcaataaatgcttgaataagtttactattttgacgagataacattagtctttttatatctttctaatattggcaaacaagccacgtaagttagatagaaaacaatcgaaattaaaattccctcaacgatattaaatggaataaccattgttaaaaggtaattgcctacaccaataaatgttctgatatcaaagttagcaaatatagcatacaaaggaatcgcaaagacatagttgagagctaccatagatacggtcaagctaactgtaccaaatagactagctttaataaaatcttttgcactctctctatttttccagaaaatagcgaaacttgctaaaaataaagctagagcaaccatattcatcggtaaaccgataaaggtttctggaccacgattagcaagtataacttttaaaagtgatcttaataagagtacaccataacttgatttcaaatcaaataaaataaaagcaactaacatcggaaggattgaaaaatcaacctttaaaaattctgctcctggtattaatggaaatgaaaccatcatcaatacaaaagataaggcagaaagaatggcgattgtcaccattttacgtgtatttgtcataaaaaaattcctccaatttaaataaattgaaagaagctccaaaggtaagcgtatgtacgcgaaaaaaacctttgtcttctcccatccagactttactgtcggttgtggaatctcaccacatcagctttcgctcgcggactgatgcttcacaactgacaaataagttggaagcgattaccgccggtcgggaattacaccctgccctgaagacacctatagcataacaaaaaaaacttgcaattgcaagttttttaattactaattagtagtagtgattaaaaatcatattaataccaaattactatgctgtatcgtttctttcagatttgctatttttagtttttcttaaaaagataaacaaaattcccaaaataatacaaccaagaattgtcagtcctccaccaataatcattcctgttttaggaagaaatgattgtggaaaaagcggttgtgatggtttaggatttgttggtggaggagtttctttttcgttttctacctctacttcctgtgttttattagcaactacagcaactacagcatccttcatagatatacggtaaccagttagtgcttttgcttctcgaaaaatatacttaccaggtaataaaccttcaacctcaatttctcccttatcatcagttactaatgaagtaatcccatcttgatcggtcgtaaatcgtccatttttaaagcgaactggctgattctggttatcgtataatacaaatattactcctgatagccttttctttatctttccttcttttgtatatttaataagttttaatcggcctgtttcaacttttcgcttaggatttatctgtaattgatttgataacttatcatctggtatttcaatataaaaaggtactattgttgaaacgctttgatcagctttataagcacgaccaaagtacgaaccatttgggagtgctatctttgtctgaccattagtatcagtaggagaagtcaagatactcttatacttctggttcaattcgctatctgtcatttggctcaataaatcaacttttaagttgtcagtcacagtccataaacgataagaaatcccctcctctgtagtatttggctgaagtcctatctgtgtgattgttagttgattaggggtatcagcatttacactggctaccgaaaaaaacgctaattgtaccaatcctaaaaagcaacatagtagaagtcctaaactttttctaatctttttcatttttgatttccctttctttttctctctttaaattttcgttttaaatataatagtaaagcgactaatataagaataactaggattgataagaggaaataaagtttatagtgtgtttgcaattctttcattaaatagttcttttctttaacaggaggtacatacttgattcgatgccctctaactagtaaacgatgtgaattaatcgaataaggtgtacatgttagcaaagtcgcataatccttacctttaacaaccaataatttagaaaaattatctggctttacaacacttatttgatcaaccttataggctaaaacttctttgatattatgaatataaaaaatttttccttttttaagtttatctaaatctgtaaataacttagctttaggtaagccgcgatgagctgtgataacagtatgtgaactttttccaccaattggcaaggaggttccttcaaggtgtcctgctcctttttcaagaacactactggtagtccccgcatagataggtaatttttgcttgatagacggtatatcaatatatccaatcatttcagtaatctcaagcatgtgggcgtattcagcaataccttttttttctttttcagtatagggatctgataggcggcttgggtccagtgttctattataagcttttgctaactcaaatcgtctattaatctctttagtatttaatttttgggtttgattatcaaagttagttacttgattattagctttaatattatagtaccaatttgaaataaaaggatatgaggttatcaaaagaccaactaagaacaatagtatcaggcctacattcatccatcgatttaaaacgaccgatttcttaaggtttttctgaaattttcctcccattatgattcaattccttttctaacacttgctaaacgatttttttgacgttgacgttttattaaccaaagtaaccaagcaataataactaaagatatatagaatagatatctataaatcgtgtttaaatgaccttcttttattaatttttcatcaataggacctttataagggatacgatgtccccttactaaaagtctgtgtgtattgatcataatcggggtgcaagttaataaggttgcataatcatgtccaggaacaaccaacaaatctgaaaagttatcgggtgtaacgacttttatctgatctacttgatatgctatcgtttcttttatgttttgaatataaaacttatctcctttttttaactttttaaggttagaaaagagttctttatctggaattcctgagtgcgctgttataacggtatgtgtgctatttcctccaattggaagagaggtaccttctaaatgccctgctcctttagatagaacttcttgacttgaacctgcaaatatagggagtttttgacctatcttaggaactgaaattgttccgattttttcacttacctctaacatacgggcgtactctgctacccccttttgaattcgttttttctcataaggatcttcaagatggacattatttaaagaatcattataagcttgtgctagagtcatacgacgattgatttctttctgactaagttttttagcagctctctcaaaatcctgtgtttgattattagattctatcgtatagtaaaaacgtgataccactggatacaataaaatagatagacctattagaaaaagaatgataaaaggaagatttgacttcttctttttttttgtttttttgttgatttttttagtcttcacgtcatctcctaaataatggctcttgcttatgatctaagagtacttctactgaaatacccttagatcataagcacagctttaactgtgcttatacatcatcaaagactagccttaagcttcctttgattggcgttttttcatgataactactgctccaagcataatgcttaaaccaataattgtgaaaagaattgtaccaataccacctgtttgtgggattgttacttttttgttttgtacttgtttggcatctttttttacaggttttttgttatctgcgttgtcagttttagccccttttctgtatgatgtttgatttacttcaaagtttatattacctgccaatttcgcatatcctgctggtgcttgtgtttcttccaggttgtaagtgcctttttccagacctgtaatttcaaattgaccttggtcgtttgaggtgtatttaatggctttatcagcctttttatctgttatccattcatatgcttttgttagctttaatgaaggcttcattgtaatctttttgtttttttttgatagtttcttttgctgtttttcctttttggcctttttgtttttttttagtcaagttgttataagctttgatagcttcatctaatgctattttagcagtttttgcagctgcctttttttgagcttttgcttgatctgctttacgtgccaggtattttccttctgagtttttcacaaggaattttgctcctgccaagcgttcagttttagcttgatttgttttgacaaatttctttccatgagtttccacttttggttctgttgggttgattggtgttgggttatttgagtttttgttgttgttgatggttactttaccattttttagttttatttcttttggagtgtagccggtaacacgttctgcgatgctgtatgttttggtattttctagacctgtgaatttacccgagtattttccaggtgttttggttttgttgctttttgtgaggtcgcttttacctttgtatgtttttgtttgtttttcttgcgcggtagttttatctttatctttcaatgtgtaagcaacgtttacatcattagttgtactttcttctgcccagtttttagtgacttttatttcttggtttgctggtgtaccttgttgttgtttcctttctttcgttggtttgttaccatagtccaatttgatatcattggtttctggattttcaatagttgtttggccgttcaccgtagctgtgtaagtgattttgatttcaatatcttttttttttgctgctttttctacttttgccagtccttttgctttgaattttagtgtgaaaccttggtcatctgttctgagtttgtagtttgtatccttaggaaaattttttgtatttcctgttgctttaaggttgttagttgaacccattgtcaaaccttttgtcattctatctgtccaaaccagttttttgtattttgagcctttgtgaatttttgttttaactttgtattgtttttttttaccgattttcgctgtggcagttgctttgtcacgtgcataattaccataatttgcgccagctgtcaaaagtctattttcgtttgtcagtgttgtcaagttgtttgtcttttgcaaagtttttatctatttgtggttttttttcagtgttctttggataaatgtgggcatctttaacaacaccttgtttgtttaccaatggcagagtgattttaactggaactgcttttgaatcagccaggatggaaccgttgttgttgtagtttgatttttctttcacttcaacgattttgtactttccttttaattttttggtgttgaaagcaagtccagtgtctttttttggtgttgatccaggcacggcctcatctttattttcttttgtttccggagtatcgtctttcttaattaaggctggtgttaatttgttaccttctttttccttaatgtattgcattttaccagttttattttttttcaaagctaaagcaaagaacgcacctttgatttctttagcttcgtttgagccaaagtaagctttaaggtcattaatttgtttacctttgtagtctttttcgttcttaccttttgttccttgggagttacttttgttaagttttgcttgtgttttgacaatcttgtgcaaggtcactgtattagttgttgcttcgtccgcaaacgctggtgcaactgagagtagtgacgttaaggtcagtagcagtgtcgagaacattgtaagatatttgttgatttttttcatttctatctccttcttattttagttaatcaacatggttaataatatgcggattttaatattaccgcagcaccactcctttcaagtcatggaattttatttaattaattaagaatactaaagcgcatgatttttaatctttttttctggatatatcactagatttcttatatcttttccaaatataaattccacctgcaatagacatcatagctccacctattaaaatgaaagatagaattcctttcccacctgtcatcggaataattccttttggtggaatatgcgtgttggtaattaaatgcttgtcaccttcctcatgatattcagaaatctgtttattaacagctattatattttttatcgatcctttaaccacttcaaaagttaaaattggtttattagtaattttttgataatccttcggcgaaactgcttctattaactgatatttgccatctttcaaatctttgtaagaaattttgccgttttctcccgtcactacttttgaattattattttttattggtaaataaagtttataatcttcattaaattcttgaagttcaaacgtagctcctttgagaagcaacttattattatctttatcaacttttgtaaattcaatttcacctaacttcttctcgtttttaatcgttattgtaggatattctctcacatcacgaattttagggattggaaaatctctaagtgtattaggatcctctgatttaggattcaatgttgttctaccattagtgtcatagaatttgttacttataaaactgtcatctagtttcacatcatatgtgagtgttactttttgtccttctcctaagttcaaacctctaacgtagagtttatttttgatgtattctaatttaacccctttaagtattccaccatcattattaggcccaccagttgcaatgctatctttcattatacttccatcatttccctgtaaagtataatcacttggttgtaatgtttgtccgttgccaagctgtaaattgattttgtcacccataggatcttctatagttccattaacaattgagttttcttttgttaaaatcttttcaaattgttgctgaattttagataaaatttcattgttagatgtatcggctgaagttactatcggggtgtagtactcaggtttggaagagaatgacttcattagttctgttatttctccatctgaaagtttaaaagcttcctctttcaatttttgaaaagtaccatcttgatttttcttatactcctcattataaacttgtctaaaagcagatatatctataccaaaattaaagatgtcataatttttctgttttaaactatttatataaagtttggttggtgttccatgttcttttactggtccatttcgataaattgtacctttagggtaattaagatttaaatctaaataatgaagtttttgtaagtttccagagattatctgtgtttgataactatctaagggaaacaaaaagtaactctccccatttccttttatatcctcgggcttatcagtaagtagaaaattacttttatttagatatccattttttttcatttgttcaaattggctttcatatgatgcacccagtttaaaattattaatagcatatgatcttgttggaacaccatcagttatatgaacaataattttttgactatttcgatctacttgactcaaaatatcatctgcctccatgaaggctttcatagtaaatgtttctcctactttactaagatagtactgcttttgttgctctggagttagtccgtttgtagttgatccccatttagctttaggagcttctgtcggaatcctttttataatctcttcagcattatttgttaattgtttatgactataattctctgtctgaattgtgaacttagtttgaaggccataatatttatcatcttctttaaattcttttacgacatctacactcctaccatcaaaaatatctgaaccataggtaactaatgcaaccctattatcactgtttgctcctaaaatatcttttactgcggtcccaagagcttcggcagctttcttggctttattatgcctttgaaaatttgggccatcgttattcattgagttagaattatcgagtacgaagacaacatctaacggcttttgtttgtccactggttttactatggtttttccactgacagttaactcaattttatatttattatgagctaaatcacctacttctgaaatacgtttagataatgttccctctggaatttctcttatatgctcaccttcacttgaatatgggttaactgcttttgcctctgactttccatttggaactgaacctttaacatgctcaagtttataagattcctttgtatcttcataaattcctgtggggggatactgcttatctagttcttcgtgattttgtccaattgtggaatttttatcaccactattttgtatcgtagtttttccattactctcaaccttaacttgccaagtctggttagtctttttataaccttcgggcgctgtttcttctgataaagtataatctccaggtatgagattatcaaaagtagcttcacctgttagctcagcagttactttttctattttactttctggatgagcagtagtttttaaaacaaaggtagcttttgaaagtggtttgttctggtcatctgtctttttaacaactaactttcctttagcaccattttccggtacggtactttcccctaaaacattggtattaagcggtatttgcgacaaacaaaaaagacttaacgtcaatattttagaaaatttttggtattttctcattttacaactcctattgtgccgaaatgtcgtttctaaatctaagatcagatacagaatatcctagaatatacaaactatcacttattatgatatcaataatttcttattataaggtatggaattttaatgttttttcccaatttttgaatgatttttctttttatttgataatcttattttttattatcttagaaatatttcaattagcttaagtagttgatttttctttttttatgttttaaaatattgcttaaaaataatgtttgagagagagtttactgaattgattgaaaattatttagaaaaagacatccttaatcaaataaaacttctaactttatgctatgattactacccttccattactctagacaaatcatgtcatcaacttggtttatctgaactacttattaggaaatattgtcatgatttaacaactttatttaacagtcaactctctctgaatatcgaaaagagtacaatagtctaccaatctaatggtgtaactagagaacaagctttcaaatatatttatcatcaatcacacgttttacaacttttaaaatttttgatcacgaatgattcaggcaggttacctttaacttactttagtgaaaaatttggactatcttgtgcaactgcttatcgcatacgaaaacatattagtccgttactagaaaaacttggatttcagattttcaaaaatactattaccggtgacgagtatcgaattcgctatttaatcgcatttttaaatgctcgatttggtatagaagtttatcccttgtctaagatggataaattgcttatcaaacgattgttattagaatactcaactacttttactgcttctcattacttcccaaatacatttattttctttgatacattgttgtctctatcatggaaacgtattaattataatgtagttgtcccttactcaccccttttcattgaactacaaaatatatttatctatgatacattacaatattgtgtcaaaaatgttattatagattcctttaaaattaatttaaaaaaagacgatatagactatatttttcttgcttaccttacttcccataactctttttctaatccaaattggactgagaagcgtatcgataatgtaatagctattttcgaaaattatcccaaattccaaaaattattacagccactcaaagatgctcttcccttatctggctcctatcatgatgagttggtaaaagttgctatcatttttttccgaacatttattttaggattaaatcaattaatccctgaaacaatttcatttccttcatggaactatcatagacatgataaattaactactattctccgaccgataattacaaattggttaagtgaaattggagaatacacgtttaaggaacaacattttcttctcctttgtgctcatctagaaagaattatcaaaaatcatattcctccgatacagatagccgtactaactacagactttattaataaccaaattttaacagaatgtttattacagaggttttcttctaaacagattcatttccacccttactatttattaactgatgatctttccaatattactaatcttaatccagatattattattaccaatccaaagctttcttcctttatcaaacatgagatttcttcagagagtttaattacatatattgatttgattcatacttcagaccagatcaatcaaatccaagaaattatttcatcaatacaggaagaaaaatattgtaaactttttgcaaaaactaatgaaataactactcgtagctcctataactcttaaaaattaacattaaaaagctagagcattgtgtaatgctctagctttttaatgttaatttttttgaataatataatccaacttttcaactgttttttcccatgtgaaatgttctttaattcttttagcaatattctgttgtagtttctctcttaatgccttatcttttactaataaatcaagagattcatggagtgactgagtattttcttccatgatgattcctaactcagggctatcaataacttcaactgttccaccgcgatctgttgcaataatagcacttgaaagtagaccagcttctaaaatagaggttggtaatccctctggatacattgaagggtaaacaaagatatcagtctgtgccattaaagacatagtctgttcaaagtttaatttccccaaaaagttaatctgtttggactgatatttctctttcaaatgtgctaattcaggtccgtctcctgcaatctgtaaataaacattttcagagtactgtgacatcgaaaatgcttctaagagcaattcaatgcctttttctttaataattctaccagcataagtgatgaaaatatcatcagcagatttttcaaggtaagccgtaccagcaaaatcagagcctagactttcagataccgaattataaataactcctttagcttctatattaaaatgttttaaccattcaacgcttctcttggataccgcataaaaatctggacgataatgcttaacacgcgctgtgagaagatgttcatagatagctccaaagaaatctaaaaaacgattattgacagaaaaatgacttgacccatggtctaaaacaatactaggtaaatggtgattctttgcaaaagatagcccttctagcgttgttaactgaaaacgtgtattacaaatcacaaaatcaatattttcatctgaaacatatttcatcagcgtgttgtattctcgatttttgttaataataggatagcgctgcttgacaatatttttggtcggtaaacggtaaatttttctacccttgtcttcatctataatcggtaaatcaccatgattagttgttacaataacaacacggtagccacgcttaaccaaatctgctgtcattttatctgtataacgttcaatacctccgaggaagggtagataatatcctgagaaaacagcaactgtttttaccttattttccatatttatccactttcatcaataagccatcttttaagcctttaatcatagcaactatttttttgctcttttgctcttctgctaccaacactcgaacaaattcatttcgcataaatactaaatatttgtatcgcttcttcttaccatatttttttataatatagatcgcattgcgtatcatgtaatattttcgaaatggtgaatgattcaatacatgaaaaacatggccaaattttttaactcgtgaagagtgtccaatttcgtgtaacagaccaataaaattaacctgataagtcttatatcccatctctgacagacgataattcatttcagagtcaacaaaatcaataaacatctcttctgcaaagccagatgtttcttcgaaaacgctcgttttcattaaagcagccgaagtaatacactcttcaatttctttatagtcaaattcttgcatcactaaattttcacggttcatatcttgatacaaacaagataacataccgaccttaggtaaatgaaggtaattttcataattatctatcaaatcacctaggacaaccgaatcttgatctaaagtcaagaaccaatcaaattcttgtgctactgcaaattgaccgatacagttcaaagcatatgcaatccctttattttctgttaaataatcaacagttaggtgcccctcttcattataatcggctactaattgagaaatttcttccttatttttcgagccattatctacgatatagatgtggcttacttgaggataaattgctcgaatgttctgatctaagcgttcaatattggggttaaaggtgacaatacccgctaaatatttcatgttctatgctcttttctaaaatctctaaataactgaatgactggtgctttggttataaaaacgataccgacatagatagttactgctactaaactttgaatgacataatttaccaatgatactgacatttgagtattgatataatagagtacagctccactaagagtagcagcaattaaatagcgcagcattcctcttgttaattctttaaaagtaaatacatctcttaaagagatagcttgatatagggagacaataaattcagtaataactgtagagataatagctcccatagcacctaaaattggtattaaaagtatattaagcacaacatttgccacaagtccaataactgcagacattgtgtaagcttttgtacgtcttgaagccagtagatactgtgtccctaaagcgttaccataagaaatgcaaatgatcatcaaa

SEQ ID NO: 548 - DNA, 8697 bp, S. agalactiae
tccacatcggtccaattaacatatgacgtggcgcatcaccagtaattcggtgaataacaatatgttttggaataatctccagttggtcacaaataatcgaaatatagtcttcttgacttaacaaacgtaaacgaccttcatggtaatctctctgcattcttgtattagtcataagatgcagaaggtgtaattttataccctgaatatcattatccgtaacacatcgacgaacattttccaccatcatatcatgtgtctcccctgggagaccatttattaggtgagaaacgatttctactttaggagctaattctcgtattctcttaacagtttttttgtaaaggtcatatgaatgtgctctatttattaatgcagaagttgcttcataagttgtctgaaggcctaattctaaagtcacatgcattctttcagaaagttcagcgagatagtatatagtttcatcaggtaagcaatccggccttgttccgatgttgatcccgataactcctggctcattaatagcctgttcgtaacgctctttaattatctctaacttagcatgggtattggtaaaattttgaaaatagactaagtatttattaacctcaggccactttctatgcatgaaatcaatttctttatagaattgttcacgaataggagcttctggagcaactatagcatcccctgaaccagaaactgtgcaaaaagtgcaccctcctctagcaactgttccatctctgttaggacagtcaaaaccagcatctataggtaatttaaatattttttctccaaagagttctcgataataatcattaatcgcacgataacgttttttcataggataattgtatcacaattttaactaaaataacctcactactacaataaaactaaaaaagattggaacgtcagttagttccaatcttttatttacttcactttctttaaccaatccttggctaaaaagatatacgcagttagattcaaaataccataagcaagtataaaaccagctaaaacatctgtcggaaaatgaacccctaggtaaatacgagataacccaattaaaaaaatgagcaaacccaatgtaccttggcacaacagtttccatatactcttaggcatatagtactgcaataaaataatactactcccaaatatcataaatgttcccatcgagtgcccactgggaaacgaatagccacctgcaaatactaaatgggttaaagttggtctcactctttgaaaaataagttttaaagaaagtatacatataccagagataatagcatttactgcgataaatctagcttgaggataccacttcttaaggtaacagaaagtgacgctcataatcgcaatagctatctggcttacagtattaccaaccacagtgattaacttgaaaaatcttgtagaaagatttggcaactgtcctctaacactttcttgaatagtttggtcaaatgcgattacagtgtcgggccaatatttgatgaccaatcctaaactgaaaaataagataatagcaataaatgcttgaataagtttactattttgacgagataacattagtctttttatatctttctaatattggcaaacaagccacgtaagttagatagaaaacaatcgaaattaaaattccctcaacgatattaaatggaataaccattgttaaaaggtaattgcctacaccaataaatgttctgatatcaaagttagcaaatatagcatacaaaggaatcgcaaagacatagttgagagctaccatagatacagtcaagctaactgtaccaaataaactagctttaataaaatcttttgcactctctctatttttccagaaaatagcgaaacttgctaaaaatagagctagagcaaccatattcatcggtaaaccgataaaggtttctggaccacgattagcaagtataacttttaaaagtgatcttaataagagtacaccataacttgatttcaaatcaaataaaataaaagcaactaacatcggaaggattgaaaaatcaacctttaaaaattctgctcctggtattaatggaaatgaaaccatcatcaatacaaaagataaggcagaaagaatggcgattgtcaccattttacgtgtatttgtcataaaaaaattcctccaatttaaataaattgaaagaagctccaaaggtaagcgtaggtacgcgaaaaaaacctttgtcttctcccatccagactttactgtcggttgtggaatctcaccacatcagctttcgctcgcggactgatgcttcacaactgacaaataagttggaagcgattaccgccggtcgggaattacaccctgccctgaagacacctatagcataacaaaaaaaacttgcaattgcaagttttttaatcactaattagtagtagattgtataatattaatttttaacatcaattaattgacagcgcactaatactctagctactcctgcctttgtacaagtaaacaagcttaagtcccaatcattgtctgatgtggcagttttataaactttttcaatcgctgttggttcaataatttctctattactgattttgtagtgatagatttgccctgttgtagttgtaaaataaacatccgttcccatatctacattttttaaagcatcaaaatgataaggaaaattatgcgcacaaatcaccatgttattagttaaataagaaccataataccttgtaggcgttttagacagttgttcaaaactataattagcagctaccggtaaatgcagttttaagttcggaatatccagagttcccaagtaatctgttttatccaacttttttacaggtaattctccattttctgaaccctttacttgatgcgtaatagatttatcaagcgccttgacaatatgctgagaagttaaatcagcttgatgcgcctgattaatattataccaaccccaatagattccagaacttaccagaatgattccgagtatcgctaaaaaatttgctgaatatcttctaatcacgtcttcttctccattttaaggctattattaaacacagaagtcctgacataattagtataggtattggccaccatacttgtccagtaaacgggagctttccctttgtctgatgtgttactgtaggagtaattgtctcttcttttttaggtttagcatttaaagggctcattttctcaaatgctgtaatatcgtacttcccatccttaggtattgatagtataaagggagacattagttcataaccttgagctgttttagtctgaataaatagataaatcccttgaggaagattgttcgcaacaataccttcagccggtaaattatcaaacgtttgtaaaggttgagttttatgaacagcttttgttagtagattgacgtatttggcttggttactatcaaggtttacttgtgttagatcatcgtcttttattccaataccttgaaatggggtagttagagtaaaaacttggttaccatcaacatctttagcttgtgctacttggtaaacaagtaaattaccgccagcgataccttgattattatacttattttgtatagtaatagaacccgttttcatctgatcattggtatcagcagacacaagttgagtacttagactaaataataagagaagagttatctttaggatctttttataaatcattgttctcttcctttctcattgcttgttttaaaattttcttacgttgacgtgctctcctagttacttctaaagagattaaaagtaaaatcaaagtaaggaaaatagcgataaatggtgcgatataaataggctctatttgtattgcctctgctactaccaaagcgttaccattatcgtttggtacacgatgtcctctcactagtaaccgatgggtattaacgccatatggtgtacacgtcaccaaagtttggtagtctttacctttaacaatttgtaaatccctcaaatcatccggtttaactgttctgatttgatccacttgataagtatatgtttcatttaagatactgactgtccagtggtctccagcttttaacttatccaaatcagaaaaaagccttgaagagggtaaacctctatgtcctgataaaatagaatgagttgagtctcctccaattggaagactacttccttctaaatgaccaatagaagtttgaagcactttttcacttgtaccatgataaagtggtaattttatgtttatctttggaattgaaatataacccatattacccgttttatcgatagccagttgtgaattataatccaaacgctcttggttagtcatgtgccacttcattcctgaagttttaaattgcttattatattctttggctcggttaataatttttttatagtcgttttcatccatatgcgttacgcggtcttggtaatccataatcgctcgagattggtgaaatgaattccaataattagcaagtgaaggataagccattaagcctacccccactgcaattatagtgacaagcaaaatggatactaaatgttgtcttatttttttcatatattttaaatctgtaccactttgctagcccatcttattaagaacgtaaacgacgacgagcaacaagcacgatacctgctcctattactaaaattgcacctataatgtagaaaattgttgtaccaataccacctgttgaaggcaactcagtacctttgttattttcaacagttgggttaactaaaaggttatctgaattagtcgtatcagtggctccatctcctaaaataaccttctgagagttatctaacaaattgtaacctaagggagcctttttctcaactagatagtatgtaccttctttcaagcctgtaatggtaattataccatctgctcctgttgtatattctgttgcattagcttctgtgccccattcaacgttatttgtatcgttaaagtttagaaattgacccgtagcattctttaaaacaaatatagcaccttgtaatgaagcttttgtggaaccatcaattttttttatagtaatttgaccatccctcactgttactttttgacctgggtcatcattgctagtattggggttgatggtcgcaatgtttgtattttctggtaaatcagctgaacctggtttagctccactctttaatactcctgtataagtgactgtgattgtatttattcccttataaaaaaagtcatcattagctccattttgagtatttccggttggagtattggtagctgcccacggaatagtaatcgtgaaattattattttcctctaacaggttatacttcccagttgctttttccgaaccttgagttagagttgtaatattccctgatccatcagtaatagttacttcataagatccttcgttcaaatcaactacagaagcagatggcatagtatcctttataacatattgatacactttttctgtaccatgataattgactgcattcttataagtaatagtatatttgactgtatcaccaaccgagtacgttttttgatctacagtttttccaccaccatctccccatgtcgcatcagtattcttttcatgaatagtagcatttggagttacagatgtaaccataattacagctccattattaacagtgctagaaacataataatatccatattgggaaacattaataacctcagtaccatcattatttgactcagtaacagtggaaactggtgtagtattagctgatatagatttagcccatgtcgcaatctcatttgctgacgcagtatcttttttagttacatatgttctccctccattagtagttgtcgtaaaaagagaattaaaatcagttgaagctttatactcagcttctttaccttgaggaattaaataagaagctccatctttattcgaatcagatacatttgcattatctatttctgcatcaaaaactttgtatgctttataggttgcgcctttttgagtatcttgaactgtaattgtccctgtctcagcggcaaaagctatcggcgtaactggtgatacagccataccaaatgctaaactcgccactaacagcgattgaatcattttctttttcattgaaatctttctcctaaaatcatattgatgaatgattaattcatattttttttcgatagtataatattaatcctgatggtagagctaaagctaaaccaactaggatataaatgtgtgttccaatacctccagtactaggcaattctgttcctttactgttagtaattttaaaagtatatactgtacttccatctactaaattctcttttattggtgtcgcattattaccattttgttcaaaggtaactcccgtagaaatcactaatactgatatatcatttttaggtagtaggtaccctggaggggcctttgtctctgttaggtagtattttcctactggcaaactgaggtagttattagcatccactaataacaagcctttatcgtttgtcaccagccctgaatacataggatgtgaagctttattcccattagcatctgattcataaatatcaaaaactgcacctgctaaaaaattattatcattttcgacattaactttctgtagtcgtactttttgcttgatacgtgtattggtaaagctaatatctacgtctcctgaaactgtcagggattgtaagccggtagcatcataagttttatcagcttcaccagttgctagatttttttctgtaattgactcagatactttaaattcatcgtaggcttgttcatctattgatatagaagttccataaggtactttaaattccttagtctgaccatctctcagcggaaaattctcttgttgcaacgtttcacttggattaaacaagaagtctttcgtcttatcttcatctagtccaacgacagttttacttactctgacggtgtattctttaggttgccaaacagcatataaggtatttgttgcatcagggttgttatcaatacctattgattgacctgctgtaaattccacacgtcctgtatcagctaaatccttatcatgatgccaaccaataaggttgtaacctgtccttgtaaagtattggttttcaggaattgtagttgtgctattcaactccatacgcggtgtctctacttgtgttaccacattaccattttctactctagtaccaccgttaccattgtatttgattgaggtatcttctaatttgatatctcctactggaataatgacaggttttatggtgatatttttattagcatctgctaaatgggcgtcaatatcaatggaatcatatgggttataaattttaccattgtaccaccagccacggaaacgatagccatctggcattgtcggacgtctcagtaaggctgaatgggagccatcgtcataggaatcagggtcagtaggctcattacttgtttgtaattgctgaccagaagcatccaatgctggctttccatctgtaccaacagcatcattgctgtatataatatgataatctccagcctttcgccaaatagctcttaaattgatatcttgagttacagcacctgaaaagttataaggtctaatactaccatctggattaacataataccaaccgactaatttgtaagcgtcttttacgtacttgtacttagttgttgtatcaacatttgagagactagtatctgtcgtataataggcatctttagttgagtcgggatctttatctcgtgaatcatacttataataatatgtacctgaaggatcttggatataatcccttgtaatatctgtataatccggaatacgatcaccataatgcaagtctaaataggtatcatctgtttttgataattggcctccgtttggatcaatattgacacgatatgttaccttttgccaacctgcatagactttaacatcatgaggaggcatagtcgtgttaaagtcaaatacttgtgtttgtgcttggtctttataccatttaccatcccaaacataccctggtcgactaggtttaggttgaaccgttgtcgtatcgggggcataagaggacaaattttgctcatatagaacatcctttactggaaaattaggaagctctgtattatcaagcggatctaaatatttaatcttgtatgaattacgttcataccataccactaagttcaaataatctttgtggtagtctccatatttatcgtagtattcatctgcgattggcacttttgtttttgcactcgtttgtcttgggttctgatcaaaatggtaattatctggatataagctttgatagtatttaacattaaatcctaggtatttttctgtaaaggtaaattcgtctgctccagcacctccccctgtgtctgctaaagagtatttgccatctagtccttgtttgtagaacggataattttgaattctctgaccttttggatagagttttatttcatctggatttgctgtatgtactccattgggtagtatgaactcacccaaataactcattccttatgttccagtttggttatttccaacattggttaggtaacgccatgcacctgtcttccattgatagccattcgcggctaaggttgtaccgtatagtcctgtgtaggtttcggcatctgatgctctagttctaggaatcgtagtattttggtaatgaatctccgagtagccctttaaacattaaca
